(19) United States
(12) Patent Application Publication
(10) Pub. No.: US 2019/0024114 A1
(43) Pub. Date: Jan. 24, 2019

(54) METHOD OF PRODUCING A PRODUCTION CELL LINE

(71) Applicant: Anton Bauer, Kirchberg/Wagram (AT)

(72) Inventors: Anton Bauer, Kirchberg/Wagram (AT); Gottfried Himmler, Gross-Enzersdorf (AT)

(21) Appl. No.: 16/069,164

(22) PCT Filed: Jan. 16, 2017
(86) PCT No.: PCT/EP2017/050793

§ 371 Date: Jul. 10, 2018

(30) Foreign Application Priority Data
Jan. 14, 2016 (EP) 16151178.7

(51) Int. Cl. C12N 15/85

(52) U.S. Cl. CPC C12N 15/85

(57) ABSTRACT

A method for producing a eukaryotic production cell line expressing a protein of interest (POI), comprising a) incorporating a gene of interest (GOI) encoding said POI into the chromosome of a eukaryotic host cell within an exogenous euchromatin protein expression locus by transfection, thereby obtaining a repertoire of recombinant host cells in a pool; b) selecting a single cell from said pool within 12 days after transfection, wherein selecting is at least according to the expression of said GOI or a marker indicating said expression; and c) isolating and expanding the selected single cell, thereby obtaining the production cell line.

[0001] The invention relates to a method for producing a eukaryotic production cell line expressing a protein of interest (POI).

### BACKGROUND

[0002] Efficient and high yield production of recombinant proteins for therapeutic or other commercial use requires stable, highly expressing recombinant cell lines. Eukaryotic cells engineered to express the desired protein at high titers in a bioreactor are typically employed in the manufacturing process of such biopharmaceuticals. For this purpose, eukaryotic cell lines are transfected with an expression vector containing the gene encoding the desired protein. A suitable single cell clone has then to be identified and selected. This step is crucial for the generation of cell lines capable of stable, reliable and reproducibly expressing high yields of desired protein (Wurm, F. M. Nature Biotechnology 22, 1393-1398 (2004)). Current methods for the identification and selection of a cell clone with optimal production and growth profile are time-consuming and laborious, involving screening of numerous transfected cells.

[0003] Most of the currently used methods utilize the ability of an additional gene product included in the recombinant DNA containing the gene-of-interest (GOI), to provide for a selective advantage for the transfected cell over the non-transfected cell, for example resistance to an antibiotic or ability to grow in a selective medium (e.g., Zboray et al., Nucleic Acid Research 43 (16), 1-14 (2015)). Zboray et al. employed a bacterial artificial chromosome vector that is stably integrated into the host cell chromosome. Clonal protein production was directly proportional to integrated vector copy numbers and remained stable during 10 weeks without selection pressure. Single cell clones were obtained by limiting dilution technique. Blaas et al. also describe bacterial artificial chromosomes to improve recombinant protein production in mammalian cells (Blaas et al. BMC Biotechnology 2009, 9:3). Again, single cell clones were established using a dilution technique.

[0004] WO2010060844A1 discloses a bacterial chromosome vector used to engineer a host cell for recombinant protein production, employing a Rosa26 locus which contains regulatory elements for open chromatin formation and an expression chromatin structure.

[0005] Selection methods based on antibiotic resistance generally use antibiotic concentrations that are rather mild to avoid any indirect toxicity to transfected cells. As a result, transfected cultures are maintained under constant presence of antibiotics until the entire non-transfected part of the transfection cell population is removed from the culture while still maintaining viability over 50% of the total population at all times.

[0006] Transient expression of non-integrated DNA in first weeks of culture is contributing to a lengthy protocol for selection of stable cell lines.

[0007] In some strategies, the antibiotics concentration is gradually increased during the selection phase. This cultivation period under selective conditions uses significant resources and time, generally taking about a month from transfection until generation of a stable pool of cells. Furthermore, selection pressure over a prolonged period of time increases the probability for further chromosomal changes or changes in the expression pattern of the host cell and cellular stress.

[0008] Once the stable pool is generated, limiting dilution is setup to isolate single clones. Cells are diluted and seeded in 96-well or 384-well plates to start with a single cell that can expand. A main disadvantage of this technique is that certain clones, which may not be best producers, could divide faster and as a result the best producer is diluted out from the culture. Therefore, to isolate a “high producer” clone by limiting dilution requires established detection methods as well as tedious and careful screening of a high number of clones to identify the best producers in a selected pool.

[0009] The introduction of green fluorescent protein and other fluorescent proteins developed therefrom allowed identification of transfected cells based on co-expression of the desired recombinant protein with the fluorescent protein. In particular, flow cytometry methods (e.g. FACS) have been employed for the rapid identification and isolation of production clones from a heterogeneous population of transfected cells involving the selection of a fluorescent co-marker, e.g. GFP, or staining of cells with fluorescent labels detecting a marker protein on the cell membrane of the host cell. The drawback of this approach is that expression of the desired protein may actually be compromised due to high expression of the fluorescent marker, and the ultimate yield of the desired protein may thus be reduced. Furthermore, selection is primarily based on high levels of the fluorescent marker which does not always correlate with high expression of the desired protein.

[0010] DeMaria et al. (Biotechnol Prog 2007, 23, 465-472) describe a selection method based on flow cytometry using expression of a cell surface protein not normally expressed in the host cell as a reporter protein. The genes encoding the reporter protein and the protein of interest are linked by an IRES, enabling their transcription in the same mRNA, and expression of the reporter protein is detected with a fluorescently labeled antibody.

[0011] As an alternative approach to using a reporter gene which is either directly or indirectly labelled, methods have been developed based on detection of the desired protein. For example, US2013009259 describes a FACS approach for single cell sorting, selecting high production clones through direct labeling of the desired protein on the cell membrane. After selection of a clone based on its fluorescence intensity, further subcloning steps are required to ensure the genetic stability of the selected clone and ability to produce the desired protein reproducibly over several generations.

[0012] Okumura et al. (Journal of Bioscience and Bioengineering 120 (3) 340-346 (2015)) report an enrichment strategy for high-producing cells employing flow cytometry. In this study, eukaryotic cells were transfected with an expression vector for a monoclonal antibody, resulting in a pool of cells with a huge variety of monoclonal antibody expression levels. Cells in this pool were stained with a fluorescent-labeled antibody binding to the mAb present on the cell surface during secretion and sorted by flow cytometry, setting cell size and intracellular density gates based on forward light scatter (FSC) and side light scatter (SSC), thereby preselecting cell fractions based on their FSC and SSC gates. These preselected cell fractions were then sorted by further flow cytometry analysis based on fluorescence levels.

[0013] FSC and SSC gating was also employed by Shi et al. to select live cells which are further screened and sorted based on fluorescence intensity (Journal of Visualized Experiments (55), e3010:1-5).

[0014] Label free cell separation and sorting in microfluidic systems is described by Gossett et al. (Anal Bioanal Chem 2010, 397:3249-3267).

[0015] WO2010128032A1 discloses CHO cell lines comprising vector constructs comprising a certain expression cassette to overexpress a mutant of the ceramide transfer protein (CERT), namely CERT S132A to enhance its secretion capabilities. Cell lines are selected for an increased level of CERT expression by single cell sorting.

[0016] US2010021911A1 discloses production host cell lines comprising vector constructs. Whereas a first vector construct comprises a DHFR expression cassette, a second vector construct comprises a gene of interest and a selection and/or amplification marker other than DHFR.

[0017] EP2700713A1 discloses a screening and enrichment system for protein expression in eukaryotic cells using a tricistronic expression cassette. Cells expressing high levels of a protein of interest are screened, sorted and/or enriched by means of a reporter protein.

[0018] WO2015092735A1 discloses eukaryotic cells expressing a protein of interest, wherein the effect of the expression product of an endogenous gene C12orf35 is impaired in said cell.

[0019] WO2012085911A1 discloses membrane-bound reporter molecules and their use in cell sorting.

[0020] WO2008145133A2 discloses a method for manufacturing a recombinant polyclonal protein composition, wherein a collection of cells transfected with a collection of variant nucleic acids sequences is transfected and further cultured for expression of the polyclonal protein.

[0021] Current methods using flow cytometry require several weeks after transfection for gene amplification and/or generation of a stable pool of cells, which can then be screened. In addition, selected clones need to be re-cloned, and further cultivated to finally identify the most suitable clone for stable high yield production.

### SUMMARY OF THE INVENTION

[0022] It is an object of the invention to provide a simple and fast method to generate, identify and select a single cell which qualifies as a first cell of a stable production cell line capable of producing a POI with high yield.

[0023] The object is solved by the subject matter as claimed.

[0024] According to the invention, there is provided a method for producing a eukaryotic production cell line expressing a protein of interest (POI), comprising

[0025] a) incorporating a gene of interest (GOI) encoding said POI into the chromosome of a eukaryotic host cell within an exogenous euchromatin protein expression locus by transfection, thereby obtaining a repertoire of recombinant host cells in a pool;

[0026] b) selecting a single cell from said pool within 12 days after transfection, wherein selecting is at least according to the expression of said GOI or a marker indicating said expression; and

[0027] c) isolating and expanding the selected single cell, thereby obtaining the production cell line.

[0028] Specifically, a selection marker gene is additionally incorporated into the host cell and the repertoire of recombinant host cells is maintained in said pool under corresponding selection pressure conditions, and wherein said selecting is at least according to any of the transfected marker gene, the marker, or the function of said marker. According to a specific embodiment, the pool is kept within a containment under said selection pressure for only a short period of time before single cell sorting, e.g. no longer than 12 days after transfection, preferably no longer than any one of 11 days, 10 days, 9 days, 8 days, 7 days, 6 days, 5 days, 3 days, 2 days, or 1 day.

[0029] The selection marker specifically provides the cell with a survival and/or growth advantage when maintained or cultivated under corresponding selective conditions, herein also referred to as “selection pressure” or “selective pressure” that allows differentiation between the robust cells and non-robust or dead cells. It is specifically preferred to employ the selection step b) directly from the pool, without any pre-selection. Thus, the repertoire can be directly undergoing single cell sorting without pre-screening under selection pressure.

[0030] In some embodiments, isolating and expanding the selected single cell according to step c) of the methods described herein follows immediately step b) without any further limited dilution step. In some embodiments, selecting a single cell according to step b) of the methods described herein immediately follows step a), preferably within a maximum of any one of 7 days, 6 days, 5 days, 3 days, 2 days, or 1 day, after step a). Specifically, said single cell sorting immediately follows the transfection of said host cell to incorporate the GOI without any cell division, or in the first or second generation, or within 5 or 10 or maximally 15 generations.

[0031] In some embodiments, selecting a single cell according to step b) of the methods described herein is by sorting according to at least one intrinsic physical biomarker only, preferably in a single step procedure, optionally followed by further sorting based on productivity.

[0032] Specifically, selecting a single cell from a repertoire of recombinant host cells according to the methods described herein is by cell sorting without using a fluorescent label, preferably without using any label.

[0033] Thus, according to a preferred embodiment, the production clone can be produced from a single cell as described herein, directly upon stably integrating the GOI into the host cell, followed by the single cell sorting, within a short timeframe.

[0034] Specifically, the selected single cell is a recombinant host cell which is immediately ready for expanding to a production host cell line without further cell engineering and/or optimization steps and/or selection pressure. According to a specific aspect, the GOI is stably integrated in the host cell chromosome, preferably within an expression construct within or comprising an expression locus or at least part of an expression locus, thereby providing the operable euchromatin protein expression locus within the host cell chromosome.

[0035] Hereinafter, the term “expression construct” is used which can be any of the expression cassettes, expression loci, or vectors, as further described herein.

[0036] Specifically, said exogenous euchromatin protein expression locus is integrated into the host cell via a vector comprising said locus, preferably an artificial chromosome vector, such as any one of a bacterial artificial chromosome (BAC), a P1-derived artificial chromosome (PAC), a yeast artificial chromosome (YAC), human artificial chromosome (HAC), or a cosmid. Such vectors can be incorporated into the host cell genome by a technique suitable for transfecting the host cell.

[0037] Specifically, said expression construct is an artificial chromosome vector, preferably any one of a BAC, PAC, YAC, HAC, or a cosmid. Specifically, the expression construct is either circular or first linearized followed by transfection of the host cell to enable chromosomal integration of one or more linearized expression cassettes.

[0038] According to a specific example, the BAC comprising the locus Rosa26, Rosa26 BAC (Rosa26 locus corresponding to clone RPCI-24-85L15 (ID:760448); GRCm38.p3 C57BL/6J: Chr. 6 (NC_000072.6): 112, 952, 746-113, 158, 583; source: NCBI; SEQ ID NO:1) is used, specifically to transfect mammalian host cells thereby producing recombinant host cells, e.g. hamster cells such as CHO. Further preferred BAC vectors are e.g., BAC comprising the locus Rps21, Rps21 BAC (Rps21 locus corresponding to clone RP23-88D12 (ID:627270;), SEQ ID NO:2), BAC including locus Actb, Actb BAC (Actb locus corresponding to clone RP23-5J14 (ID:601738;), SEQ ID NO:3) and BAC including locus Hprt, Hprt BAC (Hprt locus corresponding to clone RP23-412J16 (ID:732121;), SEQ ID NO:4), (BAC-PAC Resources: Children's Hospital Oakland Research Institute (CHORI)).

[0039] In some embodiments, said vector is integrated randomly into the chromosome of the host cell or by site-specific integration. Specifically, said GOI is randomly incorporated into the euchromatin protein expression locus, or by site-specific integration. Specifically, the GOI is incorporated into the locus within an operable expression cassette.

[0040] Specifically, an expression construct can be used which is an artificial chromosome vector that is randomly incorporated into the chromosome of the host cell according to the methods described herein. In some embodiments, said expression construct is an artificial chromosome which is incorporated into the chromosome of the host cell by site directed integration (e.g. homologous recombination or targeted gene integration into site-specific loci e.g., using CRISPR/Cas9 genome editing system). In some embodiments, the expression construct is a plasmid, which is stably incorporated into the chromosome of the host cell by site directed integration (e.g. homologous recombination or targeted gene integration into site-specific loci e.g., using CRISPR/Cas9 genome editing system).

[0041] According to a specific embodiment, one or more copies of the GOI are incorporated into the host cell chromosome, preferably at least or more than 5 copies, or at least 10, or at least 15, or at least 20 copies of the GOI. This can e.g. be achieved by the selected amount of GOI DNA used for host cell transfection. According to a specific embodiment, the selected single cell is characterized by a GOI copy number of at least or more than 5 copies, or at least 10, or at least 15, or at least 20 copies of the GOI.

[0042] According to a specific embodiment, said expression construct comprises one or more copies of the GOI and is used to transfect the host cell, thereby incorporating or establishing one or more euchromatin protein expression loci within the chromosome of the host cell which comprise one or more copies of the GOI each.

[0043] According to a further specific embodiment, said expression construct can be used to first transfect the host cell without the GOI, thereby preparing the host cell by incorporating or establishing one or more euchromatin protein expression loci within the chromosome of the host cell. In a second step, one or more copies of the GOI can be incorporated into a euchromatin protein expression locus of the host cell chromosome.

[0044] Specifically, said locus is exogenous and heterologous to the host cell.

[0045] According to a specific aspect, any exogenous locus may be used which is characterized by the open chromatin structure of a euchromatin protein expression locus. Such loci are typically understood to be constitutively active as expression locus, e.g. any of the Rosa26, Rps21, Actb, or Hprt, or any locus of a housekeeping gene, which is heterologous or foreign to the host cell.

[0046] According to a further specific aspect, any exogenous locus may be used, which is characterized by the open chromatin structure of a euchromatin protein expression locus. The exogenous locus (sometimes referred to as heterologous) is typically, but not necessarily, artificial or non-naturally occurring within the host cell chromosome, and specifically obtained from a source other than the host cell, such as from a different cell type or species. Yet, it is specifically preferred that both, the locus and the host cell is of mammalian or avian origin.

[0047] One or more copies of the expression construct may be integrated into the chromosome, preferably at least 1, 2, 3, 4, 5, 6, 7, 8, 9, or 10 copies of the expression construct, or even more than 10 copies, specifically, at least 15, 20, 25, 30, 35, 40, 45, 50 or even at least 60, 70, 80, 90, or 100 copies. The expression constructs may be integrated at one or more chromosomal loci, e.g. following transfection of the host cell line with the circular or linearized expression construct.

[0048] Bacterial artificial chromosome vectors and other vectors carrying enough DNA elements to shield against adverse neighboring chromatin effects can integrate anywhere in the host cell chromosome and support expression of genes encoded on the vector. In some embodiments, the integration may be at a chromosomal locus of a gene which is abundantly expressed by the host cell.

[0049] The repertoire of recombinant host cells specifically contains a pool of clones which are characterized by the stable integration of the expression construct into the host cell chromosome. The selecting step may immediately follow the incorporation step without previous propagation and/or enrichment of the high-producer cell lines. In some embodiments, selecting a single cell according to step b) of the methods described herein follows step a) immediately, preferably within a maximum of any one of 12 days, 11 days, 10 days, 9 days, 8 days, 7 days, 6 days, 5 days, 3 days, 2 days, or 1 day, after method step a) of the method described herein, or the transfection.

[0050] According to a specific embodiment, a pre-selection may be performed, e.g. to deplete non-functional clones, e.g. which do not survive a selective pressure, or where the chromosomal incorporation of the expression construct was not successful (e.g. removing impaired or dead cells, negative selection). Any pre-selection of cells from the pool (before single cell selection) is preferably carried out after the transfection according to step a) and before or during single cell sorting, yet, not extending the time to selecting the single cell after transfection, e.g. within 12 days after transfection.

[0051] According to a further specific embodiment, a further selection step may be performed, e.g. to enrich those clones which are characterized by a high copy number of the expression construct and/or a high copy number of the GOI (e.g. selecting according to the expression of a selection marker or according to the yield of POI production, positive selection). Such selection is preferably carried out after the single cell sorting. The transfected clones can also be enriched for clones containing a high copy number of the expression construct or GOI to yield a positively selected fraction of clones, which likely includes the high-producers. Thus, the likelihood of selecting a single cell with the potential of a high productivity of POI expression can be increased by such enrichment. Optionally, the method may comprise a further step of selection or enrichment of a cell population, e.g. including a viability enrichment step, a chromatographic enrichment step or an assay enrichment step.

[0052] Specifically, the method as described herein further comprises incorporating a selection marker gene, e.g. employing an expression construct which further comprises a selection marker gene, for coexpression of a selection marker with the POI. The selection marker may be engineered into the expression construct, such as to enable selection of clones which have incorporated the expression construct including the marker gene. Alternatively, the selection marker may be incorporated into the expression construct and/or the host cell chromosome only as an inactive gene, and becomes active and detectable upon successful chromosomal integration. Thus, the selection marker can be used as a qualitative read-out, indicating the successful transfer of the gene in the repertoire of recombinant host cells.

[0053] According to a specific aspect, one or more copies of the selection marker can be integrated into the host cell chromosome together with and near to the GOI. Specifically, the number of selection marker genes and the level of expressed selection marker can be indicative of the productivity of the recombinant host cell. Accordingly, the selection marker may be used as a quantitative indicator of POI expression. In particular, the selection marker may indicate the successfully integrated and/or functional copy number of the expression construct and/or the GOI. According to a specific aspect, the selection marker gene is operably linked to a GOI, thereby obtaining a level of expressed selection marker indicative of the level of expressed POI. In some embodiments, the gene copy number of the GOI directly correlates with the specific productivity for the POI, and the selection marker gene is integrated together with the GOI in the expression vector at a fixed ratio. In some embodiments, the copy number of the selection marker gene as well as its expression level and consequently its activity directly correlate with the POI expression level.

[0054] The pre-selection is commonly performed upon detecting the marker directly or by indirect means. The positive pre-selection method, e.g. the presence of a viability or resistance marker, may also include a maintenance or culturing step, in which the repertoire of recombinant host cells can be maintained or cultured with suitable medium under selective pressure, e.g. under conditions that favor the survival of robust clones, or clones which are characterized by the stable integration of the expression construct and optionally which reflect the copy number of the integrated expression construct or the copy number of the GOI. In some embodiments, the repertoire of cells is maintained or cultured under these conditions in one or more stages, e.g. with a high selective pressure, such as for up to 12 days, e.g. for a maximum of any one of 12 days, 11 days, 10 days, 9 days, 8 days, 7 days, 6 days, 5 days, 3 days, 2 days, or 1 day. Alternatively, more than one stage with increasing selective pressure may be applied, e.g. each for at least 1 day, or at least 2, 3, 4, 5, 6, 7, 8, or 9 days, e.g. up to 12 days.

[0055] In some embodiments, the repertoire of cells is selected for the single cell as described herein within for at most any one of 7 days, 6 days, 5 days, 3 days, 2 days, or 1 day, in particular wherein no specific cultivation step is carried out and the selection is e.g. immediately following after the transfection under the selective pressure, optionally employing a pre-selection of robust cells using selective pressure or high selective pressure as further defined herein.

[0056] Specifically, before selecting the single cell, said repertoire of recombinant cells is grown to coexpress said POI and said selection marker under high selective and stringent conditions, and a fraction of resistant (herein also referred to as “robust”) cells is pre-selected.

[0057] According to a specific embodiment, said selection marker gene is an antibiotic resistance marker gene or a metabolic function selection marker gene, which co-expresses a selection marker with the POI.

[0058] According to a specific embodiment,
[0059] a) said selection marker gene is an antibiotic resistance marker gene or a metabolic function selection marker gene; and
[0060] b) before selecting the single cell, said repertoire of recombinant cells is grown to coexpress said POI and said selection marker under selective conditions or high selective condition, and a fraction of resistant cells is pre-selected.

[0061] Specifically, the selection marker gene is
[0062] a) a metabolic function marker gene, preferably a gene encoding any of ADA, DHFR, GS, histidinol D, TK, XGPRT, or CDA; or
[0063] b) an antibiotic resistance marker gene, preferably a gene conferring resistance to any of
   [0064] i. aminoglycosides, preferably any of neomycin (G418), geneticin, kanamycin, streptomycin, gentamicin, tobramycin, neomycin B (framycetin), sisomicin, amikacin, isepamicin or hygromycin B;
   [0065] ii. puromycin;
   [0066] iii. bleomycines, preferably any of bleomycin, phleomycin, or zeocin;
   [0067] iv. blasticidin; or
   [0068] v. mycophenolic acid.

[0069] Specifically, the selection marker gene and the GOI are both incorporated into the expression construct at a defined ratio. In particular, the ratio may be predefined, e.g. by engineering an expression cassette or expression construct containing both, the selection marker gene and a predefined number of one or more copies of the GOI. According to a specific example, equal numbers of the selection marker gene and the GOI are incorporated into the expression cassette or the expression construct, referred to as 1:1 ratio. Alternatively, the predefined ratio may be less than 1:1, e.g. 1:2 (indicating 1 selection marker gene per 2 copies of GOI), or 1:3, or 1:4, or 1:5, or even less. The GOI copy number may be increased by using a defined amount of GOI for transfection, or by precise integration of the number of genes into the expression construct, e.g. by means of a specific number of expression cassettes, or by gene stacking. For example, genes may be repeatedly added, e.g. by tandem repeats, into a site within an expression construct or into a chosen locus of the host cell chromosome, in a precise manner. In addition, method steps of removing any additional foreign DNA elements such as selectable marker genes are provided to reduce the defined ratio of marker genes to GOI.

[0070] Specifically, said expression construct is randomly incorporated into the chromosome of the recombinant cell, or by site-specific integration. Upon random integration, the repertoire of recombinant cells may be pre-selected for the expression rate, indicating the chromosomal locus of high translational or expression activity, e.g. the locus brought along by the expression vector as in the case of e.g. a BAC expression vector, or of a chromosomal locus of an abundant protein or a “hot-spot”. The “hot-spot” means a position in the chromosome of a host cell which provides for a stable and highly expressionally-active, preferably transcriptionally-active, production of a product. The hot-spot is typically characterized by the open chromatin structure. The euchromatin protein expression locus as described herein is a specific example of a hot spot, if operable to express a gene contained within the locus.

[0071] Random integration is typically by non-homologous recombination, thus, without the need to construct matching (homologous) sequences for recombining the 5′ and 3′ terminal sequences of the expression construct with the endogenous target chromosomal sequence.

[0072] The site-specific integration may be performed by using an expression construct in conjunction with an insert that recognizes the target site of integration, e.g. employing site-specific DNA recombinase. In particular, an exogenous expression construct can be integrated into an endogeneous recombination target site, such as a wild-type or mutant FRT site or a lox site. In case the recombination target site is a FRT site, the host cells need the presence and expression of FLP (FLP recombinase) in order to achieve a cross-over or recombination event. In case the recombination target site is a lox site, the host cells needs the presence and expression of the Cre recombinase. Specifically, the site-directed integration can be obtained by a site-directed recombination-mediated cassette exchange. Typically, the integration of the expression construct in a site-directed way is by homologous recombination of matching sequences.

[0073] Specifically, the method step a) of the method described herein comprises incorporating said GOI into said locus by site-specific integration.

[0074] Specifically, said host cell is a mammalian, in particular human, hamster, mouse, monkey, dog, or avian host cell, preferably any one of HEK293, VERO, HeLa, Per.C6, HuNS1, U266, RPMI7932, CHO, BHK, V79, COS-7, MDCK, NIH3T3, NS0, SP2/0, or EB66 cell, any derivatives and/or progeny thereof. Specifically, production cell lines commonly used for pilot scale or industrial scale protein or metabolite production may serve as a host cell for the purpose described herein. Exemplary host cells are BHK, BHK21, BHK-TK⁻, CHO, CHO-DG44, CHO-DUXB11, CHO-DUKX, CHODUKX B11, CHO-K1, CHO Pro-5, CHOK1SV, CHO/CERT2.20, CHO/CERT2.41, CHO-S, V79, B14AF28-G3, COS-7, U266, HuNS1, CHL, HeLa, HEK293, MDCK, NIH3T3, NS0, PER.C6, SP2/0, VERO or EB66 cell.

[0075] According to a specific example, the locus is a murine Rosa26 locus, e.g. as used in the Examples described herein, or a mammalian homolog thereof. Specifically, such locus is used for engineering a CHO production host cell and respective cell line.

[0076] Specifically, said repertoire of recombinant host cells covers host cells which differ in at least one of
[0077] a) the copy number of said GOI;
[0078] b) the chromosomal locus or chromosomal loci where the GOI is incorporated;
[0079] c) the genetic stability, or
[0080] d) the epigenetic stability.

[0081] Upon stable chromosomal integration of the expression construct, the genetic stability should be principally high, but may still vary because of morphological changes of the cell. It turned out that cell intrinsic parameters and particularly the physical appearance of the cell can change indicating genetic and/or epigenetic instability. Thus, stable producer cells can be sorted according to such cell intrinsic parameters. Genetic stability and epigenetic stability of the expression locus of particular importance to produce a master cell bank and working cell lines of the production host cell, such as to reproducibly use a production host cell line. The cell line with genetic and epigenetic stability maintains the genetic properties over a prolonged period of time and can be used in a prolonged production phase, e.g. effectively producing the POI, at a high expression level, e.g. at least at a μg level (μ per mL), even after about 10 or 20 generations in the cell culture, preferably at least 30 generations, more preferably at least 40 generations, most preferred of at least 50 or 70 generations. Genetic and epigenetic stability of the expression locus of the cell line is a great advantage when used for industrial scale protein production. The genetic and the epigenetic stability of the expression locus confer that the transcription levels for mRNA encoding the POI and for mRNA encoding the marker protein are not significantly altered (e.g. less than +/−50%, or 40%, or 30%, or 20%, or 10% variance) comparing their levels during the first 10 or 20 generations with their levels after 20 or 40 or 70 generations.

[0082] Specifically, said selecting of a single cell from the pool is further by determining any one or more of intrinsic physical biomarkers. Specifically, said selection is according to any of or at least one of cell size, cell cytoplasmic granularity, polarizability, refractive index, or cell membrane potential. Any of such intrinsic biomarkers is determined based on the shape, morphology, appearance and/or function of the cell, which is independent from the POI production. Any transfected cell which is negatively selected because of deformed or deviant intrinsic physical parameters is considered not suitable for the purpose of producing a production cell line. Any transformant cell which is positively selected because it complies to the predefined parameters indicative of the intrinsic physical characteristics, is sorted to further proceed with the manufacture of the production cell line.

[0083] According to a specific embodiment, said selecting (also referred to as sorting) is by a single cell sorting technique employing an optical flow cytometry method, preferably using forward light scatter (FSC) and/or side light scatter (SSC), or a microfluidic systems such as droplet based microfluidics or Raman-activated cell sorting or applying acoustic radiation force—according to physical differences in the properties of cells including size, shape, volume, density, elasticity, hydrodynamic property, polarizability, light scattering, dielectrophoresis, and magnetic susceptibility. Such methods provide for the sorting and isolation of single cells in the clonal population by measuring the predefined selection parameter indicative of the intrinsic physical biomarker or respective cell characteristics. For example, the cells are sorted by identifying cells having a specific phenotype, e.g., viability, size, morphology, permeability, density, etc. In one embodiment, cells may be sorted in one or more stages, e.g. upon a first sorting step individual cells may be combined or “pooled” prior to further sorting according to the same selection parameter or a different one, e.g. cells of a specific size can be first pooled before further sorting. Alternatively, the cells may be individually sorted, e.g. by single cell sorting. Such single cell sorting can be highly efficient providing for a fast production of the cell line.

[0084] Typically, cells are sorted into populations and subpopulations based on the presence or absence of a certain desired phenotype or physical appearance. Sorting allows capturing and collecting cells of interest for further cloning. Once collected, the isolated single cells can be expanded and cultivated, e.g. to finally select the cells which are capable of producing the POI at a high yield, and to prepare a master cell bank and optionally further prepare a working cell bank. Specifically, there is no need to prepare subclones or any re-cloning steps. The production cell line can be established immediately from a single clone and this cell line can be used to make-up the master cell bank. Cells from the master cell bank can be expanded to form a working cell bank, which is characterized for cell viability and proliferation prior to use in a POI manufacturing process.

[0085] The flow cytometry method simultaneously analyzing multiple physical characteristics of single cells is well-known in the art. Exemplary properties measured include cell size, relative granularity or internal complexity. The characteristics of each cell are e.g. based on its light scattering properties, which is analyzed to provide information about subpopulations within the sample.

[0086] Specifically, said sorting is by flow cytometry method using forward light scatter (FSC) and/or side light scatter (SSC).

[0087] In one embodiment, forward-scattered light and side-scattered light data are collected on the sorted cells. FSC is proportional to cell-surface area or size. As a measurement of mostly diffracted light, FSC provides a suitable method of detecting particles greater than a given size independent of their fluorescence. SSC is proportional to cell granularity or internal complexity, based on a measurement of mostly refracted and reflected light. Correlated measurements of FSC and SSC allows for differentiation of cell types in a heterogeneous cell population, without the necessity for staining or labeling the cell. The cells can be further sorted based on desired properties.

[0088] The cell sorting may be performed using devices which are typically used in fluorescence-activated cell sorting (FACS) or immunomagnetic cell sorting (MACS), preferably in a high-throughput and accurate way. In one embodiment, single cells are sorted directly into separate wells to produce individual clones.

[0089] Specific sorting techniques employ gating, which sets a numerical or graphical boundary to define the characteristics of cells to be included or excluded for further analysis. For example, a gate can be drawn around the population of interest. A gate or a region is a boundary drawn around a subpopulation to isolate events for analysis or sorting. Based on FSC or cell size, a gate can be set on the FSC versus SSC plot to allow analysis only of cells of a desired size and appearance. In one embodiment, recombinant host cells pre-selected by enrichment of cells under selective pressure are sorted by FSC/SSC gating, thereby obtaining a gated subpopulation that has the predetermined physical appearance or viability characteristics indicating genetic stability and an improved productivity.

[0090] Specifically, said sorting step is without using a label, such as a fluorescence label. Thus, the sorting step can avoid staining or labeling the repertoire of recombinant host cells.

[0091] Gating parameters may be based on cell intrinsic physical parameters only, and gates can be constructed based on a unique population, e.g., identified as larger and less granular than the majority of cells in the population. Specifically, the gating step comprises selecting sorted viable, recombinant host cells that possess a distinct physical profile (FSC/SSC population). The sorted cell culture wells of interest can then be harvested and further processed as described herein.

[0092] Once the single cells are sorted, typically, the sorted cells are separately grown, e.g. in wells or other separate containments, to obtain single clones during a time period of at least 1, 2, 3, 4, 5, 6, 7, 8, 9, or 10 days up to 8 weeks, 7, 6, 5, 4, 3 weeks, or less, e.g. up to 20, 19, 18, 17, 16, 15, 14, 13, 12, or 11 days. Such single clone cultivation may be performed under selective pressure or not. Afterwards, the clones may be analysed for cell culture performance, e.g. for POI productivity and/or the expression of the selection marker, before finally defining them as the production cell line. Generally, a supernatant containing the POI is collected, which can be analysed for the quantity and/or functionality of the POI.

[0093] According to a specific aspect, said repertoire of recombinant host cells comprises at least 10.000 different clones, or at least 10⁵, or at least 10⁶, or at least 10⁷, or at least 10⁸ different clones, or at least 10⁹ different clones, which differ in at least one genetic characteristic.

[0094] Specifically, said repertoire of recombinant host cells comprises a variety of copy numbers of said GOI, and wherein the variety of copy number ranges between 1 to 500. According to a specific embodiment, the cells of the repertoire comprise at least 5 or at least 10 or at least 15 or at least 20 copies of the GOI on the average. Specifically, a subpopulation of cells may be obtained which is characterized by a higher average copy number, e.g. where the average GOI copy number per cell is at least any of 5, 10, 15, 20, 25, 30, 35, 40, 45, or 50. A selected single cell is preferably characterized by a high GOI copy number, e.g. of at least or more than 5 or 10, or at least any of 15, 20, 25, 30, 35, 40, 45, 50, 55, 60, 65, 70, 75, 80, 85, 90, or 100.

[0095] Specifically, the single cell is selected from the repertoire of recombinant cells with a selection efficiency of at least 1 selected cell from a total of at least 10³, at least 10⁴, at least 10⁵, at least 10⁶, or at least 10⁷ recombinant cells, preferably wherein the selected cell is a high producer cell with a specific productivity of at least 1pcd, more preferably of at least 2, 5, 10, 15, 25, or 35 pcd, when specific productivity is already measured upon culture and production in static 96 well plates. Such high selection efficiency is a prerequisite for directly selecting transformants from a large population of cells, and in particular those of high productivity and genetic and epigenetic stability without the need of re-cloning or producing subclones which would provide a further repertoire of recombinant host cells that would need to be further screened for improved versions of the first selected clone. The selection efficiency can be highly improved without undue pre-selections or staged selections, in particular without serial dilutions and growing the clones under selective conditions.

[0096] According to a specific embodiment, said production cell line has a specific productivity producing the POI, of at least 0.1 pcd (pg/cell/day), preferably at least 1, 5, 10, 15, 20, 25, or 30 pcd under batch, fed-batch or continuous cultivation conditions, specifically during the production phase of a fed-batch culture. Specifically, the cultivation is performed in a bioreactor starting with a batch phase followed by a production phase allowing the production of the POI at a high yield.

[0097] Preferably, said production cell line is produced within less than 60 days, specifically, less than 50, or 40 days, or within a month, more specifically within 4 weeks, or even less than 4 weeks.

[0098] Specifically, said production cell line has a specific productivity producing the POI of at least 0.1 pcd, and said production cell line is produced within less than 60 days.

[0099] Specifically, the POI is a recombinant or heterologous protein, preferably any of a therapeutic protein, an immunogenic protein, a diagnostic protein or a biocatalyst. Specifically, the POI is selected from the group consisting of antibodies or fragments thereof, enzymes and peptides, protein antibiotics, toxins, toxin fusion proteins, carbohydrate—protein conjugates, structural proteins, regulatory proteins, vaccines and vaccine like proteins or particles, process enzymes, cell signaling and cell ligand binding proteins, growth factors, hormones and cytokines, protein antibiotics, structural proteins or a metabolite of a POI. Specifically, the POI is a “difficult to express” POI.

[0100] The invention further provides for a eukaryotic production cell line or a repertoire of recombinant host cells qualifying as eukaryotic production cell lines, obtainable by the method as described herein, wherein the production cell line is characterized by at least ten copies of the GOI incorporated into the chromosome of the cell, and a constitutive productivity of at least 0.1 pcd, preferably at least 1, 5, 10, 15, 25, or 30 pcd. Such repertoire is specifically not labeled by a fluorescence label.

[0101] The constitutive productivity indicates the fitness of the cell despite its transformation to become the recombinant host cell. Thus, the production cell line of constitutive productivity supports the robust manufacturing of the POI over a long production cycle. As a result, the productivity remains stable while growing and/or during the production phase in a fed-batch culture over a long period of time.

### FIGURES

[0102] FIG. 1 shows the strategy for an improved method of isolation of stable single clones in higher eukaryotic cells for production of recombinant proteins, which are of commercial interest. Of particular interest is this new strategy for production of recombinant proteins in industrially relevant mammalian or avian cells. Within 1 month after transfection and without any labeling of cells, stable production clones with high recombinant protein production can be generated, isolated, characterized and stored via cell banking.

[0103] FIG. 2A shows schematically the strategy to identify and sort the best production clones from a mixed population based solely on the cell intrinsic parameters of light scattering—Forward Scatter (FSC) and Side Scatter (SSC)—via flow cytometry.

[0104] FIG. 2B shows an example for setting the gates for selection of a total cell population in flow cytometry based on two control populations, one live cell population and one dead cell population of the respective mixed cell population to sort. In this example, the dead cells appear in gate “P1”, whereas the live cells appear in gate “P2” and can be positively selected for further cultivation.

[0105] FIG. 3 shows two examples, which prove the concept of the presented method. (a) The upper panel shows the generation and isolation of single clones based on FSC and SSC characteristics for an intracellular protein. This intracellular protein is green fluorescent protein (GFP), which allows monitoring the production and cellular content of the POI already during selection and enrichment of the respective clones. (b) The lower panel shows the generation and isolation of single clones based on FSC and SSC characteristics for a secreted protein. The secreted protein in this example is human FGF23. For each panel, the upper and the lower, on the left side the total population of cells with the SSC on the y-axis and the FSC on the x-axis, as well as the sort gate for live cells is displayed. In the middle, the sorted population is displayed, again with the SSC on the y-axis and FSC on the x-axis. On the right side, a histogram for the sorted cells is displayed, where the channel detecting the green fluorescence is on the x-axis, and the counts in the respective channels are on the y-axis. “Total population” indicates total cell population; “Sorted population” indicates live cells that were sorted into 96-well plate and “Histogram for GFP” indicates the intensity of GFP fluorescence along the x-axis and number of cell counts on the y-axis.

[0106] FIG. 4 shows a comparison of fluorescence intensity of single clones expressing GFP selected by different methods. The clones were selected either by high (1.0 mg/ml) or medium (0.5 mg/ml) antibiotics concentration and with the presented method of flow cytometry sorting, or they were classically generated by selection in pools and subsequently limiting dilution. All the clones were analysed by their GFP fluorescence intensity via flow cytometry, and the results of the fluorescence intensity for the population of single clones generated via the respective method is shown by three common statistical parameters “Mean”, Median”, and “Mode”.

[0107] FIG. 5 shows a comparison of specific productivity (pcd) distribution of single clones isolated by different methods for the example of FGF23 producing clones. The clones were selected either by high antibiotics concentration with the presented method of flow cytometry sorting, or they were classically generated by selection in pools and subsequently limiting dilution. In FIG. 5A the results for the clones are displayed in a box and whisker plot all three statistical parameters Mean, Median and Mode were used to plot the distribution of single clone pcd for each method tested. In FIG. 5B specific productivity is displayed using a scatter plot for visualizing the distribution of individual data point within the group. In both plots, the pcd values are plotted on the y-axis in a logarithmic scale from 0.01 to 100 pcds.

[0108] FIG. 6 shows a correlation between the volumetric yield (mg/l) and the specific productivity (pcd) for the single clones producing FGF23.

[0109] FIG. 7 shows the correlation between the gene copy number of the gene of interest and the gene copy number for the marker gene. In our example the GOI is FGF23, and the marker gene is neomycin resistance.

[0110] FIG. 8 shows a correlation between specific productivity and viability indicative for resistance to very high antibiotic concentrations of single clones. In FIG. 8A the resistance to G418 concentrations of 6 mg/ml was evaluated, in FIG. 8B the resistance to 10 mg/ml was evaluated.

[0111] FIG. 9 shows the fraction of transfected production cell line, which results in high production of the POI determined on the indicated day post transfection, and selection with 1 mg/ml G418 starting on day 1 post transfection. FIG. 9A sows the result when using the circular BAC, FIG. 9B shows the result when using linear BAC.

[0112] FIG. 10A: Vector map of a conventional plasmid-eGFP (used in Example 4 for the purpose of comparison) comprising the eGFP sequence driven by a the Caggs-promoter and an optimized Kozak-sequence just upstream of the eGFP start codon.

[0113] FIG. 10B: Vector map of a convention plasmid-FGF23 (used in Example 2) for construction of a BAC containing the FGF23 expression cassette in the Rosa26 locus (FGF23 (C-terminus) vector map).

[0114] FIG. 11: Sequences

[0115] SEQ ID NO:5: Sequence of recombinant tagged human FGF23 (ctFGF23-His): c-terminal hFgF23 (180-251) protein sequence including leader sequence, short spacer and his tag; artificial sequence.

[0116] SEQ ID NO: 6: Sequence of plasmid-eGFP

[0117] SEQ ID NO: 15: Sequence of plasmid-FGF23

[0118] The sequence listing includes the following further sequences:

[0119] SEQ ID NO:1: Sequence of Rosa26 locus (corresponding to clone RPCI-24-85L15 (ID760448); GRCm38.p3 C57BL/6J: Chr. 6 (NC_000072.6): 112, 952, 746-113, 158, 583; source: NCBI), origin: mus musculus;

[0120] SEQ ID NO:2: Sequence of locus Rps21, (corresponding to clone RP23-88D12 (NCBI Clone Database ID:627270), origin: mus musculus.

[0121] SEQ ID NO:3: Sequence of locus Actb, (corresponding to clone RP23-5J14, (NCBI Clone Database ID:601738), origin: mus musculus.

[0122] SEQ ID NO:4: Sequence of locus Hprt, (corresponding to clone RP23-412J16 (NCBI Clone Database ID:732121;), origin: mus musculus.

### DETAILED DESCRIPTION OF THE INVENTION

[0123] Specific terms as used throughout the specification have the following meaning.

[0124] The term “artificial chromosome” as used herein refers to DNA molecules assembled in vitro from defined constituents, which enable stable maintenance of large DNA fragments with the properties of natural chromosomes. Artificial chromosomes usually contain elements derived from chromosomes that are responsible for replication and maintenance in the respective organism, and are capable of stably maintaining large genomic DNA fragments. In addition to replication origin sequences, the artificial chromosomes may have selection markers, usually antibiotic resistance markers, which allow the selection of cells carrying an artificial chromosome.

[0125] Artificial chromosomes are preferably derived from bacteria, like a bacterial artificial chromosome, also called “BAC”, e.g. having elements from the F-plasmid, or artificial chromosome with elements from the P1-plasmid, which are called “PAC”. Artificial chromosomes can also have elements from bacteriophages, like in the case of “cosmids”. Further artificial chromosomes are derived from yeast, like a yeast artificial chromosome, also called “YAC”, and from mammals, like a mammalian artificial chromosome, also called “MAC”, such as from humans and a human artificial chromosome, called “HAC”. Cosmids, BACs, and PACs have replication origins from bacteria, YACs have replication origins from yeast, MACs have replication origins of mammalian cells, and HACs have replication origins of human cells. Artificial chromosomes are usually in the range of 30-50 kb for cosmids, 50-350 kb for PACs and BACs, 100-3000 kb for YACs, and >1000 kb for MACs and HACs for their capacity to incorporate large DNA segments encompassing genes and their regulatory elements.

[0126] The term “cell line” as used herein refers to an established clone of a particular cell type that has acquired the ability to proliferate over a prolonged period of time. The term “production cell line” refers to a cell line as used for expressing an endogenous or recombinant gene or products of a metabolic pathway to produce polypeptides or cell metabolites mediated by such polypeptides. A production cell line is commonly understood to be a cell line ready-to-use for cultivation in a bioreactor to obtain the product of a production process, such as a POI. The production cell line can e.g. be provided as a master cell bank or working cell bank.

[0127] The term “cultivation”, also termed “fermentation”, with respect to a host cell line or production cell line is meant the maintenance of cells in an artificial, e.g., an in vitro environment, under conditions favoring growth, differentiation or continued viability, in an active or quiescent state, of the cells, specifically in a controlled bioreactor according to methods known in the industry. Specific cultivation media as used herein, in particular following the selecting step, are serum-free and contain no antibiotic or other drug which would confer selective conditions. The resulting master cell bank of the production cell line may thus be free of antibiotics. However, in some cases, selective conditions are maintained throughout the manufacturing process to obtain a master cell bank in a medium under selective pressure.

[0128] Cultivation of a production cell line and determination of its productivity can be performed in batch, fed-batch, or continuous processes, or semi-continuous process (e.g. chemostat). Whereas a batch process is a cultivation mode in which all the nutrients necessary for cultivation of the cells are contained in the initial culture medium, without additional supply of further nutrients during fermentation, in a fed-batch process, after a batch phase, a feeding phase takes place in which one or more nutrients are supplied to the culture by feeding. The purpose of nutrient feeding is to increase the amount of biomass in order to increase the amount of recombinant protein as well. Although in most cultivation processes the mode of feeding is critical and important, the present invention employing the promoter of the invention is not restricted with regard to a certain mode of cultivation.

[0129] The term “expanding” as used herein refers to an increase in number of viable cells derived from one single cell. Expanding may be accomplished by, e.g., “growing” a cell through one or more cell cycles, wherein at least a portion of the cells divide to produce additional cells.

[0130] As used herein, “coexpression” refers to expression of two or more nucleic acid sequences in the same cell. The level of expression of the two or more nucleic acid sequences may be the same or different. However, expression can be at a defined ratio, i.e. high expression of one nucleic acid sequence indicates high expression of the other nucleic acid sequence. Thus, expression of the two or more nucleic acids is correlated.

[0131] For example, the GOI and the selection marker gene can be expressed simultaneously, concurrently or sequentially in the same cell. High expression of the selection marker gene, for example assessed by resistance to a drug or toxin (e.g. an antibiotic), indicates that also the GOI is expressed at a high rate. In some embodiments, the GOI and selection marker genes are operably linked, and thereby coexpressed.

[0132] The term “euchromatin protein expression locus” is herein understood in the following way:

[0133] A locus (plural: loci) is the specific location or position of a gene or DNA sequence on a chromosome, in the field of genetics. A locus can be contained within a chromosomal segment that includes expression sequences which may be operable to express a gene. The locus as described herein is specifically a locus suitable for protein expression and characterized by a euchromatin structure.

[0134] Chromatin is a complex of macromolecules found in cells, consisting of DNA, protein and RNA. The primary functions of chromatin are 1) to package DNA into a smaller volume to fit in the cell, 2) to reinforce the DNA macromolecule to allow mitosis, 3) to prevent DNA damage, and 4) to control gene expression and DNA replication. The primary protein components of chromatin are histones that compact the DNA. The structure of chromatin depends on several factors. The overall structure depends on the stage of the cell cycle. During interphase, the chromatin is structurally loose to allow access to RNA and DNA polymerases that transcribe and replicate the DNA. The local structure of chromatin during interphase depends on the genes present on the DNA: DNA coding genes that are actively transcribed (“turned on”) are more loosely packaged in an open chromatin structure and are found associated with RNA polymerases (referred to as “euchromatin”), while DNA coding inactive genes (“turned off”) are found associated with structural proteins and are more tightly packaged (heterochromatin).

[0135] Specific loci in eukaryotic cells are particularly suitable for introducing a GOI or engineering expression constructs, which loci are characterized by the presence of euchromatin, and herein referred to as euchromatin protein expression loci. Exemplary loci which are characterized by euchromatin and described herein are any of Rosa26, Rps21, Actb, or Hprt and analogs of mammalian cells, such as human, mouse, hamster, dog, monkey, and in non-mammalian cells such as avian cells.

[0136] The chromatin structure and modifying elements are further described below:

[0137] A “chromatin element” means a nucleic acid sequence on a chromosome having the property to modify the chromatin structure when integrated into that chromosome. “Cis” refers to the placement of two or more elements (such as chromatin elements) on the same nucleic acid molecule (such as the same vector, plasmid or chromosome). “Trans” refers to the placement of two or more elements (such as chromatin elements) on two or more different nucleic acid molecules (such as on two vectors or two chromosomes). Chromatin modifying elements that are potentially capable of overcoming position effects, and hence are of interest for the development of stable cell lines, include antirepressors, boundary elements (BEs), matrix attachment regions (MARs), locus control regions (LCRs), and universal chromatin opening elements (UCOEs). Boundary elements (“BEs”), or insulator elements, define boundaries in chromatin in many cases and may play a role in defining a transcriptional domain in vivo. BEs lack intrinsic promoter/enhancer activity, but rather are thought to protect genes from the transcriptional influence of regulatory elements in the surrounding chromatin. Boundary elements have been shown to be able to protect stably transfected reporter genes against position effects in Drosophila, yeast and in mammalian cells. They have also been shown to increase the proportion of transgenic mice with inducible transgene expression. Locus control regions (“LCRs”) are cis-regulatory elements required for the initial chromatin activation of a locus and subsequent gene transcription in their native locations (Grosveld, F. 1999, “Activation by locus control regions” Curr Opin Genet Dev 9, 152-157). The activating function of LCRs also allows the expression of a coupled transgene in the appropriate tissue in transgenic mice, irrespective of the site of integration in the host genome. While LCRs generally confer tissue-specific levels of expression on linked genes, efficient expression in nearly all tissues in transgenic mice has been reported for a truncated human T-cell receptor LCR and a rat LAP LCR. The most extensively characterized LCR is that of the globin locus. “MARs”, according to a well-accepted model, may mediate the anchorage of specific DNA sequence to the nuclear matrix, generating chromatin loop domains that extend outwards from the heterochromatin cores.

[0138] The model of loop domain organization of eukaryotic chromosomes is well accepted. According to this model, chromatin is organized in loops that span 50-100 kb attached to the nuclear matrix, a proteinaceous network made up of RNPs and other non-histone proteins. The DNA regions attached to the nuclear matrix are termed SAR or MAR for respectively scaffold (during metaphase) or matrix (interphase) attachment regions. As such, these regions may define boundaries of independent chromatin domains, such that only the encompassing cis-regulatory elements control the expression of the genes within the domain. However, their ability to fully shield a chromosomal locus from nearby chromatin elements, and thus confer position-independent gene expression, has not been seen in stably transfected cells. On the other hand, MAR (or S/MAR) sequences have been shown to interact with enhancers to increase local chromatin accessibility. Specifically, MAR elements can enhance expression of heterologous genes in cell culture lines.

[0139] All the above elements contribute to confer epigenetic stability of an expression locus and perpetuate its expression activity state. The molecular basis of epigenetics is complex and involves modifications of the activation or inactivation of certain genes. Additionally, the chromatin proteins associated with DNA may be activated or silenced. When a cell divides, it must not only accurately duplicate its genome, but also restore its previous levels of gene expression. The information determining gene expression is often not directly encoded in the DNA and is hence termed ‘epigenetic’. The molecular basis of epigenetic memory arises at least from the collaboration of several mechanisms, including histone post-translational modifications, transcription factors, DNA methylation and noncoding RNAs. The term epigenetic stability as used herein refers to above mentioned mechanisms. The genetic and the epigenetic stability of the expression locus in the production cell line confer that the transcription levels for mRNA encoding the POI and for mRNA encoding the marker protein are not significantly altered (e.g. less than +/−50%, or 40%, or 30%, or 20%, or 10% variance) comparing their levels during the first 10 or 20 generations with their levels after 20 or 40 or 70 generations.

[0140] Chromosomal loci containing combinations of the above mentioned elements to keep the chromatin in an open or active state are thus providing an advantage for stable and constitutive expression of genes of interest. Such chromosomal loci can be adapted to form expression vectors. In order to amplify the DNA of such expression vectors, the chromosomal loci are generally combined with vector elements (herein referred to as “backbone”) to allow the rapid amplification of vector DNA in genetic organisms like bacteria or yeast. Such constructs are then called PAC, BAC, HAC, Cosmids or YAC.

[0141] A bacterial artificial chromosome (BAC) is typically a DNA construct, with a vector backbone based on a functional fertility plasmid (or F-plasmid), used for transforming and cloning in bacteria, usually E. coli. The bacterial artificial chromosome's usual insert size is 150-350 kbp, which can originate, for example, from mouse, hamster or human. A similar cloning vector called a PAC may be produced from the bacterial P1-plasmid.

[0142] Similarly, Yeast artificial chromosomes (YACs) are typically genetically engineered chromosomes derived from the DNA of the yeast. By inserting large fragments of DNA, from 100-1000 kb which can originate, for example, from mouse, hamster or human, the inserted sequences can be cloned and physically mapped. The primary components of the vector backbone of a YAC are the autonomously replicating sequence (ARS), centromere, and telomeres from S. cerevisiae. Additionally, selectable marker genes, such as antibiotic resistance and a visible marker, are utilized to select transformed yeast cells.

[0143] BAC-based vectors (and inter alia PAC and YAC) are specifically appropriate expression vectors for the purpose as described herein, because they can accommodate large eukaryotic genomic DNA inserts containing open chromatin regions or “hot spots”. This makes the BAC-based vectors insensitive to chromatin positional effects and confers them constitutive, copy number-dependent and predictable expression. Cell clones generated with BAC-based expression vectors typically contain several integrated copies of the BAC vector. This leads to a boost in the expression of the gene of interest straightforward after transfection and clone isolation, without subsequent rounds of transgene amplification. Consequently, BAC based vectors should carry chromatin regions or hot spots that allow high expression levels of the transgene. For example, the Rosa26 and housekeeping genes like the Hprt locus are considered to be hot spots.

[0144] The term “heterologous” refers to a nucleic acid e.g., a gene or regulatory element such as a promoter, refers to a nucleic acid occurring where it is not normally found or not naturally occurring, thereby engineering an artificial polynucleotide or nucleic acid. For example, a heterologous gene may be a native, wild-type, or mutant gene and linked to a nucleic acid sequence which is not normally found operably linked to the gene. Any gene that is an exogeneous gene, i.e. derived from a different organism or species, is a heterologous gene. Any exogenous locus, i.e. derived from a different organism or species, is a heterologous locus. A locus isolated from a cell and engineered to produce an expression construct is understood as artificial locus and exogenous to the source cell, even if it is re-introduced into the same cell or same type of cell. It is understood that the POI encoded by a heterologous GOI is considered as a heterologous POI.

[0145] The term “operably linked” as used herein refers to the association of nucleotide sequences on a single nucleic acid molecule, e.g. an expression cassette or construct, in a way such that the function of one or more nucleotide sequences is affected by at least one other nucleotide sequence present on said nucleic acid molecule. For example, a promoter is operably linked with a coding sequence of a recombinant gene, when it is capable of effecting the expression of that coding sequence. As a further example, a nucleic acid encoding a signal peptide is operably linked to a nucleic acid sequence encoding a POI, when it is capable of expressing a protein in the secreted form, such as a preform of a mature protein or the mature protein. Specifically such nucleic acids operably linked to each other may be immediately linked, i.e. without further elements or nucleic acid sequences in between the nucleic acid encoding the signal peptide and the nucleic acid sequence encoding a POI.

[0146] “Expression cassette” as used herein refers to nucleic acid sequences comprising a desired coding sequence and control sequences in operable linkage such that recombinant cells transformed or transfected with these sequences are capable of expressing the encoded protein. Expression cassettes frequently and preferably contain an assortment of restriction sites suitable for cleavage and insertion of desired coding sequence. An expression vector may contain one or more expression cassettes operable to express one or more genes.

[0147] An expression cassette as described herein specifically comprises a promoter operably linked to a desired coding sequence (or to a cloning site for a coding sequence) under the transcriptional control of said promoter.

[0148] In some embodiments, the expression cassette comprises a GOI, i.e. a nucleic acid sequence encoding a POI. Specifically, the GOI is a heterologous GOI. In some embodiments, the expression cassette comprises a coding sequence of a selection marker gene. In some embodiments, the expression cassette comprises both, a GOI and a selection marker gene, operably linking the GOI and the selection marker.

[0149] The term “expression construct” as used herein refers to a nucleic acid molecule comprising one or more expression cassettes. Expression constructs comprising more than one expression cassette may comprise expression cassettes with the same or different coding sequences and/or the same or different promoters. An expression construct may be a vector, plasmid or an artificial chromosome, in particular an artificial chromosome vector. The expression construct as used herein is incorporated into the host cell chromosome, and preferably not provided in a non-chromosomal location, e.g. as a plasmid. The stable incorporation into one or more chromosomes of the host cell renders the recombinant host cell genetically stable which facilitates the positive selection of high producer cells from the repertoire of recombinant host cells, thereby reducing the percentage of unstable transformants in the selection.

[0150] The procedures used to ligate the DNA sequences, e.g. coding for regulatory sequences, selection marker and/or the POI, respectively, and to insert them into suitable vectors containing the information necessary for integration or host replication, are well known to persons skilled in the art, e.g. described by J. Sambrook et al., “Molecular Cloning 2nd ed.”, Cold Spring Harbor Laboratory Press (1989). Specific techniques employ homologous recombination.

[0151] In some embodiments, the expression construct comprises one or more GOI expression cassettes. In some embodiments, the expression construct additionally comprises one or more selection marker gene expression cassettes. In some embodiments, the expression construct comprises the number of selection marker genes and GOI at a predefined ratio. For example, an expression construct may comprise one copy of a selection marker gene and any one of at least 1, 5, 10, 20, 30, 40, 50, 70, 100, 200, 300, 400 copies of a GOI.

[0152] As an example, an expression construct may comprise one copy of a selection marker gene and 10 copies of a GOI, thus providing the selection marker gene and the GOI at a predefined ratio of 1 to 10. In some embodiments, the expression construct comprises one or more expression cassettes with one copy of a GOI and one copy of a selection marker, thereby providing the selection marker gene and the GOI at a fixed or predefined rate of 1:1. For example, an expression construct may comprise any one of at least 1, 5, 10, 20, 30, 40, 50, 70, 100, 200, 300, 400 expression cassettes each comprising one copy of a selection marker gene and one copy of a GOI, whereby the predefined rate of selection marker gene to GOI is 1:1.

[0153] A “host cell” as used herein refers to a cell suitable for introduction of an expression construct and for expressing a protein of interest. Host cells are capable of growth and survival when placed in either monolayer culture or in suspension culture in a medium containing the appropriate nutrients and growth factors. Host cells can be eukaryotic cells, preferably mammalian cells (e.g. human, or rodent cells such as hamster, mouse or rat cells) or avian cells. In general, host cells can be any cell suitable for recombinant expression of a POI. Examples of preferred host cells are any one of the following:

[0154] Human production cell lines: HEK293, VERO, HeLa, Per.C6, VERO, HuNS1, U266, RPMI7932 (and derivative CHL),

[0155] Hamster cell lines: CHO, BHK, V79,

[0156] Derivatives thereof like preferably CHO-DG44, CHO-DUXB11, CHO-DUKX, CHODUKX B11, CHO-K1, CHO Pro-5, CHOK1SV, CHO/CERT2.20, CHO/CERT2.41, CHO-S, or B14AF28-G3 or preferably BHK21, BHK-TK−

[0157] Mouse cell lines: NIH3T3, NS0, SP2/0

[0158] Monkey cell lines: COS-7,

[0159] Dog cell line: MDCK

[0160] Avian cell line: EB66,

[0161] or the derivatives/progenies of any of the foregoing.

[0162] The term “intrinsic physical biomarker” or “intrinsic physical properties” is interchangeably used herein, refers to intrinsic physical cell properties which are directly measurable on or in the cell, without determining the function of the cell, e.g. determining an expression product or a reporter, and in particular without the use of staining techniques or a label, in particular without using a fluorescence label. A wide range of fluorophores are typically used as labels in flow cytometry, and specifically not used in the selection step as described herein. Fluorophores are typically attached to an antibody that recognizes a target on or in the cell; they may also be attached to a chemical entity with affinity for the cell membrane or another cellular structure. Such label would only determine the expression of the cellular target, but would not provide an indication of whether the cell has a normal physical appearance or function as a viable cell (independent of POI expression).

[0163] Intrinsic physical properties include, but are not limited to cell size, cell cytoplasmic granularity, polarizability, refractive index, cell membrane potential, cell shape, electrical impedance, density, deformability, magnetic susceptibility, and hydrodynamic properties.

[0164] In some embodiments of the methods described herein, the intrinsic physical property is cell cytoplasmic granularity, polarizability, refractive index and/or cell membrane potential.

[0165] “Cell size”, as used herein, refers to the volume of a cell and how much three-dimensional space it occupies. Cell size can be measured e.g. by flow cytometry using the forward scatter parameter. This parameter is a measurement of the amount of the laser beam that passes around the cell and gives a relative size for the cell. Using a known control or standard such as beads with a known size, the relative size of the cells based on the size of the control or standard can be measured. For example, the selected host cells as described herein can be within a range of 5-10 μm for small cells, or 10-20 μm for mid-sized cells, and 20-40 μm for large cells. In some embodiments, the selected host cell as described herein has a cell size that is at least 10%, 20%, 30%, 40% or 50% larger or smaller than a control value or a cell size within a range. The control can be the mean or median size of a live, dying or dead cell or cell population of the same cell sort or type as the selected host cell.

[0166] “Cell cytoplasmic granularity”, as used herein, refers to the spatial frequency of variation in the optical contrast/index of refraction within a cell. Cell cytoplasmic granularity may be visualized by microscopic analysis of cells following staining with a dye, such as Prussian blue. It can be measured e.g. by flow cytometry without using a dye by the side scatter parameter, which is a measurement of the amount of the laser beam that bounces off of particulates inside of the cell. For example, the selected host cells as described herein can be characterized by a cell cytoplasmic granularity which is 80%, 70%, 60%, 50% or less compared to a control. The control can be the mean or median granularity of a live, dying or dead cell or cell population of the same cell sort or type as the selected host cell. The ratios of the values for cell size (FSC) divided by cell granularity (SSC) are for live cells commonly 10% higher, more often 20%, 30%, 40%, 50%, or even 2×, 3×, 4×, 5× or 10× or more higher than the ratios of the FSC/SSC values for dying or dead cells.

[0167] “Polarizability”, as used herein, refers to the dynamical response of a cell to external fields. A dielectrophoretic field can be applied by a biodevice to align cells in a dimension-orientation sorter and/or to move size-sorted cells in a size-based sorter. This dielectrophoretic field can be defined as an electric field that varies spatially or is non-uniform where it is being applied to the particles (e.g. cells). Positive dielectrophoresis occurs when the particle (e.g. cell) is more polarizable than the medium (e.g., buffer solution) and results in the particle being drawn toward a region of higher field strength. A system operating in this way can be referred to as operating in a positive dielectrophoresis mode. Negative dielectrophoresis occurs when the particle is less polarizable than the medium and results in the particle being drawn toward a region of lesser field strength. A system operating in this way can be referred to as operating in a negative dielectrophoresis mode. Live (positive control) or dead (negative control) cells of the same sort or type as the cells to be selected are used to set up a system taking into account how the cells behave in the respective medium or buffer conditions. Whether cells are less or more polarizable in the experimental conditions depends on their state, i.e. alive or dead. Accordingly, the conditions will be set in such a way that the cells positively selected behave in terms of their polarizability like live cells or a subpopulation of live cells with advantageous characteristics. Using the above two control populations (live cells, or dying and dead cells), the settings of the system will be adjusted in a way, that first less than 5% of the dead cells is sorted and second more than 50% of the live cells are sorted. Depending on the separation efficiency and number of cells, the percentage for selecting the dying or dead cells can be reduced below 5%, and the percentage for selecting the living cells can be increased to more than 50%

[0168] The “refractive index” of a cell is herein understood as a dimensionless number that describes how light or any other radiation propagates through the cell. It is a measure of the light-bending ability of the cell. For example, for the selected host cells as described herein, a specific refractive index for either live cells (live cell index) or dead cells (dead cell index) can be characterized in the experimental buffer or medium conditions with control cells of the same sort, which are either live or dead. The changes in the refractive indices of cell surfaces enables efficient identification and separation of cells with significant differences in surface composition, such as live or dead cells. For example, the selected host cell as described herein can be characterized by a change of refractive index compared to a control, e.g. mean or median refractive index of a live or dead cell or cell population of the same sort or type, of at least 10%, 20%, 30%, 40% or at least 50%.

[0169] The term “cell membrane potential” is herein understood as the difference in electric potential between the interior and the exterior of a biological cell. Cell membrane potentials change in several ways with the physiologic state of the cell. Since the expenditure of metabolic energy is required to maintain potentials, the potential across the membrane of an injured or dying cell is decreased in magnitude. More specifically, changes in membrane potential occur, when cells are stressed due to the absence of marker gene expression and environmental conditions (such as cell culture media conditions containing antibiotics or lacking essential molecules), which require marker gene expression for cell survival and/or cell proliferation. Before, after, or during the incubation of the cell population with the culture medium containing for example an antibiotic cytotoxic in the absence of a selection marker, a representative characteristic of the cell membrane potential of a live cell population as well as of a dead cell population is detected as a reference characteristic. Since several of the methods used to detect changes in membrane potential are non-destructive, the processes may be used in combination with cell sorting to produce cell populations rich in cells with desired marker gene specificities while preserving cell viability. This detected characteristic is used to determine, whether individual cells in a mixed population are live cells, dying cells or dead cells. For example, the selected host cell described herein may behave in terms of the cell membrane potential (e.g. in terms of a representative characteristic of the cell membrane potential) like live cells or a subpopulation of live cells with advantageous characteristics. One method of measuring membrane potential involves a modification of the techniques employed in conventional electronic cell counters. In these devices, individual cells suspended in saline are passed through an orifice interposed between a pair of electrodes which maintain a current in the suspending solution. The passage of a cell through the orifice varies the conductivity of the solution, resulting in a detectable voltage pulse. The height of the pulse is indicative of cell volume. Since the membranes of cells with different membrane potential typically have different ionic conductivities, signals containing information indicative of variations in the ion conductivity of the membrane of individual cells passing through the orifice can be obtained using alternating current. These may be used to compare the membrane potentials of individual cells, e.g. with the aid of a pulse height analyzer. Cell membrane potential can be further measured, for example, by patch clamp techniques.

[0170] The term “cell shape” refers to the spatial form contour or appearance of a cell. For example, the selected host cells as described herein can be characterized by a cell shape which has generally a bigger size and/or a more uniform shape than a control cell or cell population, such as a dying or dead cell or cell population of the same sort or type. The cell shape can be determined by physical parameters like their light scattering behavior such as in flow cytometry, or by their dielectrophorectic force or by their acoustic radiation force.

[0171] The term “electrical impedance” as used herein refers to the properties of a physical object that oppose the flow of electrical current through it. The electrical impedance of biological matter, such as a cell gives information on their state (e.g. live or dead cell) or function. For example, the selected host cells as described herein can be characterized by an electrical impedance which is different to a control. The control can be the mean or median electrical impedance of a live, dying or dead cell or cell population of the same cell sort or type as the selected host cell. The selected host cell may have a difference in electrical impedance of at least 10%, 20%, 30%, 40% or 50% compared to a control. Splitting an initially uniform cell population into two aliquots, where in one aliquot cells are kept live and in the other aliquot cell death is induced, the effect of electrical impedance of live and dying or dead cells can be determined such as in a Coulter-type electrical impedance measurement. Cells, being poorly conductive particles, alter the effective cross-section of the conductive microchannel. As these cells are less conductive than the surrounding liquid medium, the electrical resistance across the channel increases, causing the electric current passing across the channel to briefly decrease, and the intensity of this decrease correlates with the cell being a live, dying or dead cell. By monitoring such pulses in electric current, the number of cells for a given volume of fluid can be detected and their status analysed. The size of the electric current change is related to the size of the particle, enabling a particle size distribution to be measured, which can be correlated to mobility, surface charge, and concentration of the particles.

[0172] The term “hydrodynamic properties” refer to the properties of a cell which arise from physical interactions of the cell with aqueous solvent, such as deformability, viscosity and sedimentation, which causes different movement in a liquid medium. Hydrodynamic properties can be used as parameter for continuous particle separation to identify and sort live cells in a population. Splitting an initially uniform cell population into two aliquots, where in one aliquot cells are kept live and in the other aliquot cell death is induced, the hydrodynamic properties of live, dying or dead cells can be determined and used as control values. Generally, the cell shape for live cells is bigger than for dying or dead cells, and by their combination of size and surface appearance they have a different movement in a symmetric or asymmetric liquid flow. This can be used for separation of live and dead cells using bifurcation of laminar flow around obstacles such as cells. For example, a host cell as described herein can be positively selected when displaying hydrodynamic properties of live cells or a subpopulation of live cells with advantageous characteristics. With methods such as “pinched flow fractionation” or “asymmetric pinched flow fractionation”, continuous separation of cells can be achieved (Takagi et al., Lab Chip 5:778 (2005)). Pinched flow fractionation (PFF) allows the continuous size separation of cells in a microchannel. This method is also advantageous in that it utilizes only the laminar flow profile inside a microchannel, and thus, complicated outer field control can be eliminated. To be more specific, liquids with and without cells are continuously introduced into a microchannel having a pinched segment, and cells are separated perpendicularly to the direction of flow according to their sizes by hydrodynamic force. In addition, separated particles can be collected independently by making multiple branch channels at the end of the pinched segment. In asymmetric pinched flow fractionation (AsPFF), microchannels are equipped with asymmetrically arranged multiple branch channels at the end of the pinched segment. With this microchannel, liquid flow in the pinched segment is asymmetrically distributed to each branch channel, and the difference in cell positions near one sidewall in the pinched segment can be effectively amplified. This enables precise separation of small cells by a relatively large-sized pinched segment.

[0173] According to the methods described herein a single cell is sorted according to physical intrinsic biomarkers of the host cell employing a predefined selection parameter. In some embodiments, the predefined selection parameter is a level and amount and in particular a threshold. The threshold can be a threshold percentile which is determined in relation to other (non-selected) cells of the repertoire or the whole repertoire. For example, the predefined selection parameter can refer to the percentile of cells above and/or below and/or around a target value (i.e. closest to the target value), where the target value is e.g. the median or mean value of a subpopulation of cells (e.g. control cells, in particular live cells as positive control, or dead cells as negative control), or of the whole population of cells, e.g. the whole repertoire of recombinant host cells.

[0174] In some embodiments, the predefined selection parameter refers to a minimum, maximum, mean, or median value. In some embodiments, the predefined selection parameter is a level, amount, range or threshold compared to a control. The control can be a calibration value or curve, minimum, maximum, mean or median values of a physical property (e.g. cell size, granularity, volume, refractive index, polarizability, density, elasticity, deformability, cell membrane potential, cell shape, hydrodynamic properties, light scattering, dielecrophoresis or magnetic susceptibility). The predefined selection parameter can be a relative value as compared to controls, such as live or dead cells or a respective cell population of the same sort or type as the selected host cell. The predefined selection parameter can also refer to a region, a range or gate for a population of cells with certain characteristics, such as a population of live cells or a population of cells within a threshold percentile (e.g. 10^{th} percentile of cells closest to a target value, e.g. a mean or median value of a physical property).

[0175] In some embodiments the predefined selection parameter is a percentile score of any one of 10^{th} percentile, 20^{th} percentile, 30^{th} percentile, 40^{th} percentile, 50^{th} percentile. 60^{th} percentile, 70^{th} percentile, 80^{th} percentile or 90^{th} percentile score. As an illustration, if a score is in the 90^{th} percentile, it is higher than 90% of the other scores. In some embodiments, the predefined selection parameter is percentage of cells defined as best hits, e.g. 5% or 10% of the cells which best match the predefined selection parameters, or 20% best hits, or 30%, as determined by a score system. A score can be based on one or more cell intrinsic physical properties. In some embodiments, a score is based on cell size and cell granularity (e.g. a minimum, maximum or average cell size/cell granularity).

[0176] Several methods for measuring cell intrinsic physical properties, i.e., physical appearance are known in the art including, but not limited to methods based on microscale filters, hydrodynamic filtration, deterministic lateral displacement, field-flow fractionation, microstructures, inertial microfluidics, gravity, biomimetic microfluidics, magnetophoresis, aqueous two-phase systems, acoustophoresis, dielectrophoresis, optics, droplet-based microfluidics, raman-activated techniques, flow cytometry methods.

[0177] In the methods described herein, a single cell can be selected by sorting using an optical flow cytometry method or microfluidic systems—such as droplet based microfluidics or Raman-activated cell sorting or applying acoustic radiation force—according to physical differences in the properties of cells including size, shape, volume, density, elasticity, hydrodynamic property, polarizability, light scattering, dielectrophoresis, and magnetic susceptibility.

[0178] Cells can be separated in the dielectric separation method for example in three-dimensional (3D) nonuniform electric fields generated by employing a periodic array of discrete but locally asymmetric triangular bottom microelectrodes and a continuous top electrode (Ling et al. Microelectrode Array; Anal. Chem. 84 (15), pp 6463-6470 (2012)). Traversing through the microelectrodes, heterogeneous cells are electrically polarized to experience different strengths of positive dielectrophoretic forces, in response to the 3D nonuniform electric fields. The cells that experience stronger positive dielectrophoresis are streamed further in the perpendicular direction to the fluid flow, leaving the cells that experience weak positive dielectrophoresis, which continue to traverse the microelectrode array essentially along the laminar flow streamlines.

[0179] When cells suspended in fluid are exposed to ultrasound and a pressure amplitude, they experience an acoustic radiation force. Separation of particles utilizing this force can be achieved by generating a standing wave over the cross section of a microfluidic channel (Gossett et al. Anal Bioanal Chem: 397:3249-3267 (2010)). In this configuration, while a fluid carries cells through the channel, a radiation force pushes cells towards either the pressure nodes or the pressure antinodes of the standing wave. The strength of the acoustic radiation force depends on three different properties: the volume of the cell, the relative density of the cell and the fluid, and the relative compressibility of the cell and the fluid. The acoustic force can have the opposite sign for cells with different densities. These cells will be attracted to different parts of the channel: pressure nodes (high density cells) or antinodes (low density cells). Typically the focused cells are collected through a centered outlet while other particles exit from other outlets.

[0180] Raman analysis is a non-invasive method to acquire the chemical fingerprint of the whole single-cell without the need of labeling, identifying rapidly cell properties such as single-cell genotypes, physiological states and metabolite changes. The information of the targeted cells/particles can be identified and analyzed by the Raman spectra, the Raman spectroscopy data can be analyzed automatically and the switching device for sorting cells can be controlled by computer. The specific cells can be controlled using technical means including optical, magnetic or electric field, and the cells can be sorted into the different microfluidic channels by the microfluidic device. Therefore, it is well suited to isolate individual living cells from a population of dying or dead cells.

[0181] Droplet-based microfluidics as a subcategory of microfluidics in contrast with continuous microfluidics has the distinction of manipulating discrete volumes of fluids in immiscible phases with low Reynolds number and laminar flow regimes. Microdroplets offer the feasibility of handling miniature volumes of fluids conveniently, provide better mixing and are suitable for high throughput experiments. One of the key advantages of droplet-based microfluidics is the ability to use droplets as incubators for single cells. Devices capable of generating thousands of droplets per second opens new ways characterize cell population based on a specific marker or intrinsic cell property measured at a specific time point, or also based on cells kinetic behavior such as protein secretion or enzyme activity or proliferation.

[0182] When using flow cytometry cells may be sorted and selected based on FSC and/or SSC plots employing gates. A skilled person can employ general FACS techniques, e.g. using a population of living cells and defining a gate around them. Then one can use a population of dying or dead cells and check the gate setting, that those cells are not (or just accidentally) within the “living” gate. Thus, in the sample to be analysed and sorted, living cells would fall into the predefined gate, whereas the dead or dying cells would be outside this gate and discarded. In some embodiments, a host cell as described herein is selected if it falls within the gate for live cells or within a live cell population with advantageous characteristics. Such characteristics could be a particular subgate within the live cell gate, which defines a more narrow range for cell size and/or cell granularity (FSC/SSC). By evaluating the protein production characteristics of cells sorted by different narrow subgates within the live cell gate has the potential to identify a particular subgate, where the most productive cells can be found in higher frequency.

[0183] For example, the selection of cells (population of interest) to be sorted can be in the same gate in a FSC/SSC plot as those of a healthy proliferating control population. The starving or dying cells can be shifted to a lower FSC and higher SSC area and thus are mainly found outside of the sort gate. For setting the gate for a repertoire of host cells, two control or standard populations (one healthy, one dying) of the host cell line of the same type (but without being transfected, or just mock transfectants) are required. In a typical setting for a FACS Aria III Flow Cytometer from Becton Dickinson (as used in the present example below), the Voltage setting would be 140V for FSC-A and 250V for SSC-A. In a FSC/SSC plot (FSC-A on the x-axis, SSC-A on the y-axis), the asymmetric live gate is between 60 and 250 units in the FSC, and between 10 and 150 units in the SSC, starting narrow on the left bottom side and getting broader to the right and upper side. In general, the live cells to be sorted show about 110% or higher values for FSC-A, and only 90% or lower values (excluding the debris) for SSC-A.

[0184] The term “isolating” as used herein is defined as the process of releasing and obtaining a single cell from a mixture or collection of cells. An isolated cell is then separated from its original environment such as a cell culture, a repertoire of host cells transfected with an expression construct, a fraction of said repertoire of host cells (e.g. a fraction of pre-selected cells resistant to a drug), or a pool of cells selected based on their cell intrinsic properties, in particular their physical appearance. An isolation procedure described herein may involve the isolation of a single cell which was selected by sorting according to physical appearance.

[0185] The term “gene of interest” or GOI as used herein refers to a nucleic acid or polynucleotide or nucleotide sequence encoding the POI. The gene specifically may be a wild-type gene including introns or an open reading frame, or a codon-optimized or mutant gene.

[0186] The term “protein of interest” or POI as used herein refers to a polypeptide or a protein that is produced by means of recombinant technology in a host cell. More specifically, the protein may either be a polypeptide not naturally occurring in the host cell, i.e. a heterologous protein, or else may be native to the host cell, i.e. a homologous protein to the host cell, but is produced, for example, upon integration by recombinant techniques of one or more copies of the GOI into the genome of the recombinant cell, or by recombinant modification of one or more regulatory sequences controlling the expression of the gene encoding the POI, e.g. of the promoter sequence. In some cases the term POI as used herein also refers to any metabolite product by the recombinant cell as mediated by the recombinantly expressed protein.

[0187] The POI can be any eukaryotic, prokaryotic or synthetic polypeptide, and is particularly heterologous to the host cell. It can be a secreted protein or an intracellular protein, preferably for therapeutic, prophylactic, diagnostic, analytic or industrial use.

[0188] Specifically, the POI as described herein is a eukaryotic protein, preferably a mammalian protein, specifically a mammalian or human protein heterologous to the host cell.

[0189] Specifically, the POI is a single or multi-chain protein, including e.g. covalently (e.g. via binding bridges, or disulfide linked) or non-covalently linked homo- or heteromers of polypeptide chains.

[0190] According to one aspect of the invention, the POI is a recombinant or heterologous protein, preferably selected from therapeutic proteins, including antibodies or fragments thereof, enzymes and peptides, protein antibiotics, toxin fusion proteins, carbohydrate—protein conjugates, structural proteins, regulatory proteins, vaccines and vaccine like proteins or particles, process enzymes, growth factors, hormones and cytokines, or a metabolite of a POI.

[0191] Examples of preferably produced proteins are immunoglobulins, immunoglobulin fragments, aprotinin, tissue factor pathway inhibitor or other protease inhibitors, and insulin or insulin precursors, insulin analogues, growth hormones, interleukins, tissue plasminogen activator, transforming growth factor a or b, glucagon, glucagon-like peptide 1 (GLP-1), glucagon-like peptide 2 (GLP-2), GRPP, Factor VII, Factor VIII, Factor XIII, platelet-derived growth factor1, serum albumin, enzymes, such as lipases or proteases, or a functional homolog, functional equivalent variant, derivative and biologically active fragment with a similar function as the native protein.

[0192] The POI may be a native (wild-type) protein or structurally similar to the native protein and may be derived from the native protein by addition of one or more amino acids to either or both the C- and N-terminal end or the side-chain of the native protein, substitution of one or more amino acids at one or a number of different sites in the native amino acid sequence, deletion of one or more amino acids at either or both ends of the native protein or at one or several sites in the amino acid sequence, or insertion of one or more amino acids at one or more sites in the native amino acid sequence. Such modifications are well known for several of the proteins mentioned above.

[0193] A POI can also be selected from substrates, enzymes, inhibitors or cofactors that provide for biochemical reactions in the host cell, with the aim to obtain the product of said biochemical reaction or a cascade of several reactions, e.g. to obtain a metabolite of the host cell. Exemplary products can be vitamins, such as riboflavin, organic acids, and alcohols, which can be obtained with increased yields following the expression of a recombinant protein or a POI according to the invention.

[0194] A POI produced according to the invention may be a multimeric protein, preferably a dimer or tetramer.

[0195] A specific POI is an antigen binding molecule such as an antibody, or a fragment thereof. The term “antibody” as used herein shall always include antigen-binding fragments thereof or domains of such antibodies. Among specific POIs are antibodies such as monoclonal antibodies (mAbs), immunoglobulin (Ig) or immunoglobulin class G (IgG), heavy-chain antibodies (HcAb's), or fragments thereof such as fragment-antigen binding (Fab), Fd, single-chain variable fragment (scFv), or engineered variants thereof such as for example Fv dimers (diabodies), Fv trimers (triabodies), Fv tetramers, or minibodies and single-domain antibodies like VH or VHH or V-NAR.

[0196] According to one embodiment, the POI is a “difficult to express” protein, herein also referred to as “difficult POI”, which is meant to be difficult to be expressed in heterologous expression systems. Such proteins typically require the expression of more than one polypeptide chains and/or specific folding by the host cell and/or post-translational modifications, e.g. glycosylation or phosphorylation, to render the protein functional. In a host cell factors such as codon usage, translation rate, and redox potential can have a significant impact on its capability to express such difficult POI. Exemplary difficult POI are selected from the group consisting of antibodies, viral envelop proteins, cytokines, cell surface receptors or parts thereof.

[0197] The term “recombinant” as used herein shall mean “being prepared by or the result of genetic engineering”. Thus, “recombinant nucleic acid” refers to nucleic acid formed in vitro by the manipulation of nucleic acid into a form not normally found in nature. A “recombinant protein” is produced by expressing a respective recombinant nucleic acid. A “recombinant cell” specifically has been genetically engineered to contain at least one recombinant nucleic acid sequence. A “recombinant host cell” is a host cell comprising a heterologous nucleic sequence, and is typically transformed with an expression construct to become recombinant.

[0198] As used herein, the term “repertoire” refers to a mixture or collection of diverse host cells which result from transfecting a host cell line with the same expression construct, i.e. the same GOI and/or selection marker, and differ in at least one genetic characteristic. The members of the repertoire of host cells are not all identical and within the repertoire can be distinguished e.g. by any one of or at least one of the (i) copy number of the GOI and/or selection marker, (ii) the site of integration of the GOI and/or selection marker into the chromosome, (iii) the genetic stability, and (iv) the epigenetic stability.

[0199] For example, a repertoire of host cells may comprise host cells with varying copy numbers of an expression cassette or construct, e.g. varying within the range of 1-500 copy numbers, e.g. on the average 1, 5, 10, 20, 30, 40, 50, 60, 70, 80, 90, or 100; or may include a fraction (or collection) of cells with at least any one of 5, 10, 20, 30, 40, 50, 60, 70, 80, 90, 100, 200, 300, 400, or 500 copy numbers.

[0200] The repertoire may include e.g. host cells with one or more expression cassettes or expression constructs incorporated at a number of different sites ranging between 1-100, e.g. 1-5 or 1-20 different loci, e.g. on the average 1, 5, 10, 20, 30, 40, or 50 different loci; or may include a fraction (or collection) of cells with at least any one of 1, 2, 3, 4, 5, 6, 7, 8, 9 or 10 different chromosomal sites in the host cell.

[0201] The repertoire may include e.g. host cells with varying genetic stability. “Genetic stability” as used herein refers to the maintenance of the recombinant nucleic acid, and in particular the number of expression constructs, incorporated in the host cell over a predetermined period of time in the cell culture. A repertoire of host cells with a variety of genetic stability thus comprises host cells which maintain their recombinant nucleic acid within a range of 5-70 generations, thus during a time period reflecting the respective multiplicity of the generation time, e.g. on the average 5, 10, 20, 30, 40, 50, or 70 generations; or may include a fraction (or collection) of cells with at least any one of 10, 20, 30, 40, 50 or 70 generations.

[0202] The term “epigenetic stability” as used herein shall refer to the epigenetic stability of the expression locus, which determines that the transcription levels for mRNA encoding the POI and for mRNA encoding the marker protein are not significantly altered (e.g. less than +/−50%, or 40%, or 30%, or 20%, or 10% variance) comparing their levels during the first 10 or 20 generations with their levels after 20 or 40 or 70 generations. This can be determined by measuring the mRNA levels for the GOI transcripts by quantitative RT-PCR and normalizing it to the mRNA levels for a housekeeping gene like Rps21.

[0203] A repertoire of host cells is obtainable either by random incorporation of a recombinant nucleic acid or site-directed incorporation, e.g. homologous recombination or targeted gene integration into site-specific loci using CRISPR/Cas9 genome editing system. The repertoire of host cells as described herein specifically refers to the whole cell population which was successfully transfected with the expression construct and is characterized by specific beneficial features of the cell which are suitable for the use of the cell in the development of a production cell line.

[0204] When a repertoire of host cells is obtained by incorporating an expression construct comprising one or more GOI expression cassettes wherein a selection marker gene is operably linked to the GOI, the expression construct can be incorporated at a variety of chromosomal loci and/or a variety of copy numbers. In this case, expression of the GOI and the selection marker can be at a predefined rate. Thus, the expression level of the selection marker can be indicative of the GOI expression level and the productivity of the POI production host cell.

[0205] When a repertoire of host cells is obtained by incorporating one expression construct comprising a defined number of selection marker expression cassette and independently one or more GOI expression cassettes, the selection marker expression can be indicative of the successful transfer of the construct into the host cell chromosome. Depending on whether the ratio of the expression of the selection marker and the POI is predetermined or varying, the selection marker can as well be indicative of the level of GOI expression or not.

[0206] When a repertoire of host cells is obtained by incorporating an expression construct comprising a GOI expression cassette and separately incorporating an expression construct comprising a selection marker expression cassette, the repertoire of host cells may include host cells with either one of the two expression constructs or both incorporated at a variety of copy numbers at a variety of chromosomal loci. In this exemplary case, expression of the GOI and the selection marker gene is not correlated.

[0207] A “selectable marker gene” or “selection marker gene” refers to a gene conferring a phenotype which allows the organism expressing the gene to survive under selective conditions. The gene specifically encodes the selection marker, and may be a wild-type gene including introns, or a codon-optimized or mutant gene.

[0208] Cells can proliferate under selective conditions if they are capable of overcoming a shortage of specific factors or if they can resist the otherwise detrimental effects of a drug. Cells which proliferate under selective conditions (herein also referred to as “selection resistant cells” or simply “resistant cells”) can supplement a missing metabolic function or have property of growing despite the presence of a drug, e.g. an antibiotic. For example, the selection marker gene can include one or more genes conferring the ability to grow in the presence of a drug, that otherwise would kill the cell. According to a further example, the selection resistant cell has the ability to grow in the absence of a particular nutrient, e.g. the ability to grow on a medium devoid of a necessary nutrient that cannot be produced by a deficient and untransformed cell, or the ability to grow on medium, e.g., an energy source, that cannot be used/metabolized by a deficient and untransformed cell.

[0209] Selection marker genes thus include one or more genes conferring resistance to a drug, e.g. an antibiotic (hereinafter referred to as “antibiotic resistance marker gene”), and marker genes conferring a metabolic function (hereinafter referred to as “metabolic function marker gene”).

[0210] In case of antibiotic resistance marker genes, only cells which have been transformed or transfected with this gene are able to grow in the presence of the corresponding antibiotic and are thus selected. For example, in order to select for the presence of an expressed antibiotic resistance gene such as neomycin phosphotransferase, the antibiotic geneticin (G418) is preferably used as the medium additive.

[0211] Exemplary antibiotic resistance marker genes that can be used as a genetic marker for eukaryotic cells include, but are not limited to (i) any aminoglycoside resistance marker genes such as genes conferring resistance to neomycin (G418), geneticin, kanamycin, streptomycin, gentamicin, tobramycin, neomycin B (framycetin), sisomicin, amikacin, and isepamicin, and hygromycin B; (ii) genes conferring resistance to puromycin; (iii) genes conferring resistance to bleomycines, preferably bleomycin, phleomycin or zeocin; (iv) blasticidin; or; (v) mycophenolic acid.

[0212] According to the methods described herein, selective conditions are obtained upon addition of the antibiotics to the cell culture medium following transfection with the expression construct to introduce the corresponding selection marker gene product into the host cell. Such method of selection for antibiotic resistance indicative of successful gene transfer into the recombinant host cell is well-known in the art and is well-described in the standard lab manuals. The repertoire of host cells as described herein is then grown (e.g., in the presence of the antibiotic) for at least any one of 1 day, 2 days, 3 days, 4 days, 5 days, 6 days, 7 days, 10 days or up to 12 days, under selective conditions expressing the selection marker gene and the GOI. Alternatively, the repertoire of host cells as described herein is kept under cultivating or maintenance conditions (e.g., under selective conditions expressing the antibiotic selection marker gene and the GOI in the presence of the antibiotic) for at most any one of 7 days, 6 days, 5 days, 3 days, 2 days, or 1 day.

[0213] According to a specific embodiment, the repertoire of host cells is first prepared and then kept in the pool under antibiotic selection pressure, e.g. by adding the antibiotic to the pool medium, such that more than 70%, 80% or 90% of the cells in the pool are killed. The antibiotic selection pressure is then removed, e.g. after 1, 2, 3, 4, 5, or 6 days of antibiotic selection pressure by exchanging or diluting the pool medium. The single cell sorting is then performed under low or no antibiotic selection pressure.

[0214] In the following, the various antibiotics and selective conditions for cells bearing the antibiotic resistant genes are described.

[0215] Aminoglycoside antibiotics comprise at least one amino-pyranose or amino-furanose moiety linked via a glycosidic bond to the other half of the molecule. Their antibiotic effect is based on inhibition of protein synthesis. Aminoglycoside resistance genes are commonly employed in the molecular biology of eukaryotic cells and are described in many standard textbooks and lab manuals. The aminoglycoside resistance gene product is reported to be a functional gene product in view of its aminoglycoside-degrading activity. Aminoglycoside resistance marker genes thus further include functional variants of known aminoglycoside resistance genes, i.e. gene products of variant resistance marker genes with aminoglycoside-degrading activity.

[0216] The aminoglycoside can be employed in a concentration of at least 0.01 mg/ml or at least 0.1 mg/ml, preferably in a concentration of at least 1 mg/ml, most preferably in a concentration of at least 4 mg/ml. In a further particularly preferred embodiment, aminoglycoside is employed in a concentration of 10 μg/ml to 400 μg/ml, preferably at a concentration of 1 to 4 mg/ml. Hygromycin B is an aminoglycoside antibiotic, which is employed in a concentration of at least 10 μg/ml, preferably 10 μg/ml to 400 μg/ml.

[0217] Puromycin is an antibiotic, which is employed in a concentration of at least 0.5 μg/ml, preferably 0.5 μg/ml to 10 μg/ml. Bleomycin, zeocin and phleomycin are glycopeptide antibiotics, which are employed as follows: Bleomycin is employed in a concentration of at least 50 μg/ml, preferably 50 μg/ml to 200 μg/ml. Zeocin is employed in a concentration of at least 0.1 mg/ml, preferably 0.1 to 0.4 mg/ml. Phleomycin is employed in a concentration of at least 0.1 μg/ml, preferably 0.1 μg/ml to 50 μg/ml. Blasticidin is a nucleoside antibiotic employed in a concentration of at least 2 μg/ml, preferably 2 μg/ml-10 μg/ml. Mycophenolic acid is employed in a concentration of at least 25 μg/ml.

[0218] In some embodiments, the selection marker gene is a neomycin phosphotransferase gene (e.g., neo from Tn5 encodes an aminoglycosidase 3′-phosphotransferase, ATP 3′II), KanMX (a hybrid gene consisting of a bacterial aminoglycoside phosphotransferase under control of the TEF promoter from Ashbya gossipii), hygromycin B phosphotransferase gene, puromycin-N-acetyltransferase (pac) gene, histidinol dehydrogenase, bleomycin resistance gene, bls (an acetyltransferase) from Streptoverticillum sp, bsr (a blasticidin-S deaminase) from Bacillus cereus, BSD (another deaminase) from Aspergillus terreus and Streptoalloteichus hindustanus (SH) ble gene, or functional variants of the above listed genes.

[0219] Preferably, the resistance gene product according to the present invention is a Neomycin-Phosphotransferase (the resistance gene commonly known as Neo′). Selection with G418 (Geneticine, as defined under Chemical abstracts Registry Number 49863-47-0) or Neomycin can be used to select for cells expressing the neomycin resistance gene product.

[0220] Exemplary metabolic function marker genes include, but are not limited to adenosine deaminase (ADA), dihydrofolate reductase (DHFR), glutamine synthetase (GS), histidinol D, thymidine kinase (TK), xanthine-guanine phosphoribosyltransferase (XGPRT), and cytosine deaminase (CDA).

[0221] Metabolic function marker genes may be dominant or recessive marker genes. Recessive marker genes require a particular host which is deficient in the activity under selection. Dominant marker genes function independent of the host.

[0222] Several recessive metabolic function marker genes are involved in the salvage pathway pyrimidine or purine biosynthesis. When the de novo pyrimidine or purine biosynthesis is inhibited, the cell can utilize salvage pathways using respective enzymes (e.g. thymdine kinase, xanthin-guanine-phosphoribosyltransferase, adenine phosphoribosyltransferase or adenosine kinase) necessary for conversion of nucleoside precursors to the respective nucleotides. These salvage pathways are not required for cell growth when de novo purine and pyrimidine biosynthesis are functional. Cells deficient of a salvage pathway enzyme are viable under normal growth conditions, but addition of drugs that inhibit de novo biosynthesis of purines or pyrimidines results in death of deficient cells because the salvage pathway becomes essential.

[0223] For example, thymidine kinase negative cells can be transfected with the thymidine kinase selection marker gene. When growing these cells under selective conditions, e.g. in a medium containing methotrexate or aminopterin, which inhibit the enzyme dihydrofolate reductase thus blocking the de novo synthesis of thymidine monophosphate, cells which have been successfully transfected, i.e. contain the thymidine kinase marker gene, survive and can be selected. A commonly used medium providing selective conditions for thymidine kinase is HAT medium, which contains hypoxanthine aminopterin and thymidine. Such selective medium for thymidine kinase is usually complete medium supplemented with 100 μM hypoxanthine, 0.4 μM aminopterin, 16 μM thymidine and 3 μM glycine.

[0224] Cells producing E. coli XGPRT can synthesize guanosine monophosphate (GMP) from xanthine via xanthine monophosphate (XMP). After transfection with XGPRT selection marker, surviving cells producing XGPRT can be selectively grown with xanthine as the sole precursor for guanine nucleotide formation in a medium containing inhibitors (aminopterin and mycophenolic acid) that block de novo purine nucleotide synthesis. Such selective medium generally contains dialyzed fetal bovine serum, 250 μg/ml xanthine, 15 μg/ml hypoxanthine, 10 μg/ml thymidine, 2 μg/ml aminopterin, 25 μg/ml mycophenolic acid and 150 μg/ml L-glutamine.

[0225] Cytosine deaminase is a non-mammalian enzyme, which catalyzes the deamination of cytosine and 5-fluorocytosine to form uracil and 5-fluorouracil, respectively. Inhibition of the pyrimidine de novo synthesis pathway creates a condition in which cells are dependent on the conversion of pyrimidine supplements to uracil by cytosine deaminase. Thus, only cells expressing the cytosine deaminase gene can be rescued in a respective selection medium, usually containing 1 mM N-(phosphonacetyl)-L-aspartate, 1 mg/ml inosine, and 1 mM cytosine.

[0226] The dihydrofolate reductase (DHFR) is required for the biosynthesis of glycine from serine, thymidine monophosphate from deoxyuridine-monophosphate and for the biosynthesis of purine. DHFR deficient cells require the addition of thymidine, glycine and hypoxanthine and do not grow in the absence of added nucleosides unless they acquire a functional DHFR gene. Methotrexate (MTX), a folate analogue, binds to and inhibits the dihydrofolate reductase and thus causes the cell death of the exposed cells. Cells are selected for growth with increasing or high MTX concentrations (e.g. 0.01 to 300 μM MTX), requiring the surviving cells to contain increased levels of DHFR.

[0227] Glutamine synthetase (GS) is the enzyme responsible for the biosynthesis of glutamine from glutamate and ammonia. This enzymatic reaction provides the only pathway for glutamine formation in a mammalian cell. In the absence of glutamine in the growth medium, the GS enzyme is essential for the survival of mammalian cells in culture. Some mammalian cell lines, such as mouse myeloma lines, do not express sufficient GS to survive without added glutamine. With these cell lines, a transfected GS gene can function as a selectable marker by permitting growth in a glutamine-free medium. Other cell lines, such as Chinese hamster ovary (CHO) cell lines, express sufficient GS to survive without exogenous glutamine. In these cases, a GS inhibitor, e.g., methionine sulphoximine (MSX used at a concentration between 10 μM to 70 μM), can be used to inhibit endogenous GS activity such that only transfectants with additional GS activity can survive. GS can thus be used as selection marker using culture medium without glutamine either (i) in GS deficient host cells, natively deficient or deletion of gene or (ii) or cells with GS function and a GS inhibitor.

[0228] Adenosine deaminase (ADA) is present in virtually all mammalian cells and is not an essential enzyme for cell growth. ADA catalyzes the irreversible conversion of cytotoxic adenosine nucelosides to their respective nontoxic inosine analoges. Cells propagated in the presence of cytotoxic concentrations of adenosine or cytotoxic adenosin analogues such as 9-D-xylofuranosyl adenine (XylA) require ADA to detoxify the cytotoxic agent. 2′-deoxycoformycin (dCF), a tight binding transition state analogue inhibitor of ADA can be used to select for amplification of the ADA gene, using concentrations of 0.01 to 0.3 μM dCF. As a selective media for ADA a medium containing 10 μg/ml thymidine, 15 μg/ml hypoxanthine, 4 μM 9-β-D-xylofuranosyl adenine can be used.

[0229] The Salmonella typhimurium gene hisD encodes the protein histidinol dehydrogenase, which catalyzes the conversion of histidinol to the amino acid histidine. Histidinol is toxic to mammalian cells, while histidine is an essential mammalian amino acid. Consequently, growth selection in cultures with media containing histidinol in place of histidine occurs by both histidine starvation and histidinol poisoning. Typical selection conditions are provided by a medium containing 1 mM N-(phosphonacetyl)-L-aspartate, 1 mg/ml inosine, and 1 mM cytosine.

[0230] Selective conditions may also trigger amplification of the selectable marker gene if the gene used is an amplifiable selectable marker gene. Methotrexate, for example, is a selecting medium which is suitable for amplifying the DHFR gene. 2′-deoxycoformycin (dCF) can be used for amplifying the ADA gene.

[0231] The term “high selective pressure” means selection under high stringency, e.g. very high antibiotic concentration in the culture medium (e.g. at least 1 mg G418 per ml of ml culture medium). High stringency means selection pressure that will remove, kill, make distinguishable or selectable more than 90%, preferably more than 99%, even more preferably more than 99.9%, most preferable 99.99% of cells that have been subjected to transfection so that the remaining small fraction represents the successfully transfected clones with the highest expression level. Most preferably the selection pressure will be employed on the transfected cells within less than 3 days to obtain a repertoire of surviving or robust cells. In some embodiments, the repertoire of cells is selected for single cells immediately after subjecting the transfectants to a high selective pressure, and the single cell sorting is followed by cultivation of sorted cells under low or no selective pressure, i.e. wherein at least 50% of the sorted cells, preferably at least 40%, or at least 30%, or at least 20%, or at least 10%, or at least 1% survive the selective pressure.

[0232] “Transformation” and “transfection” are used interchangeably to refer to the process of introducing DNA into a cell.

[0233] According to the methods described herein, an expression construct is incorporated into the chromosome of the host cell, thereby obtaining a repertoire of host cells. The expression construct can thereby either be randomly incorporated or integrated at a specific site.

[0234] The term “randomly incorporated” refers to integration of a nucleic acid, at unspecified sites of a chromosome, i.e. without directed integration at a specific site.

[0235] The term “site-specific integration” as used herein refers to directed incorporation of a nucleic acid at a specifically chosen site of a chromosome. For example, site-specific integration can be achieved by homologous recombination or with the CRISPR/Cas9 system. Specific examples employ a site specific recombination system well known in the art. While Cre-lox recombination is the most widely used site-specific recombination system, other systems may be used such as the Flp-FRT recombination system, Dre-rox recombination system. PhiC31-attP/attB or another of the phage integrases.

[0236] The term “homologous recombination” as used herein refers to a gene targeting means for artificially modifying a specific gene on a chromosome or a genome. When a genomic fragment having a portion homologous to that of a target sequence on the chromosome is introduced into cells, the term refers to recombination that takes place based on the nucleotide sequence homology between the introduced genomic fragment and the locus corresponding thereto on the chromosome.

[0237] As used herein, “locus” refers to a specific location or DNA sequence on a chromosome. A locus can be characterized by endogeneous regulatory sequences which support expression of proteins.

[0238] Preferred loci are Rosa26, Hprt, b-actin and Rps21 or generally loci harboring housekeeping genes with high expression levels for site-specific integration. For random integration using artificial chromosomes such as BACs containing such loci or any other form of chromatin modifiers stabilizing open chromatin sites for gene expression, any site allowing the integration of the vector DNA into the host cell genome is suitable, particularly any euchromatin containing site.

[0239] The term “selection efficiency” refers to the number of desired cells that are selected based on predefined parameters out of a repertoire of cells. It is expressed as x selected cells (also referred to as “hits”) out of at least y number of cells in the repertoire. With a higher selection efficiency, a larger repertoire of cells can be screened to identify the best hits. The hits selected from the repertoire of transfected and/or recombinant host cells are particularly characterized by the high productivity for the respective protein-of-interest of the production host cell.

[0240] Using flow cytometry or similar systems for cell sorting, 10 million transfected cells can be analysed per hour and the best 100 cells from 10 million can be selected by this method and sorted into cell culture plates such as 96-well or 384-well plates. This includes, that also less than 10 million cells can be analysed, and just a single best cell can be sorted, or the cells sorted could be adjusted to the best 0.01%, or up to the best 0.1%, or best 1% or up to the best 10%. If more than 10 million transfected cells are available, then also up to 100 million cells or even more can be sorted, provided that the sorting procedure is not causing increased cell death thereby interfering with the selection criteria. An arbitrary number of cells can be collected by setting the limit to the percentage of best cells according to the numbers of cells, which can be handled for isolation and cultivation.

[0241] An arbitrary number can also be plated in limiting dilution form transfected cell pools. However, the selected cells from the pools are plated without further quality criteria. Therefore a large number of cells need to be plated and screened to obtain an increased probability for identified high producers. Typically, cells are seeded in 384 or 96 well plates and screened for their proliferation and production properties with more than 5 plates and frequently with robotic systems. There is additionally another drawback when plating the cells via limiting dilution, as there is just an average number of cells plated with a high degree of uncertainty, about the exact number plated. For example, when the cell concentration is adjusted to 10 cells per milliliter, and 100 μl per well is plated, then in average 1 cell is plated per well. This includes, that frequently according to statistics, two cells or no cell are found per well. Thus, to obtain single clones with high certainty, a second cell cloning step is required. Therefore, limiting dilution requires considerable time and human and material resources for obtaining high producing single clones.

[0242] In the examples described, 1 million cells were transfected each for generating pools and subsequent limiting dilutions or for fast generation of stable clones and sorting the best 96 clones via flow cytometry. Either a stable pool with prolonged antibiotic selection was generated and afterwards plated in 96 well plates via limiting dilution without any further selection criteria, or host cells were transfected and selected 1 or 2 days after transfection for a short period of time under high antibiotic concentrations followed by single cell sorting via flow cytometry to isolate the best 96 clones from 1 million transfectants, thereby achieving a selection efficiency of 1 clone out of at least 10⁴ cells.

[0243] Therefore, the present invention is based on a novel method for identifying and selecting single cells to generate stable and high-producer production cell lines. The method is basically employing single cell sorting of a repertoire of recombinant host cells based on intrinsic physical biomarkers. According to an example, a single cell clone for generating a stable production cell line can be isolated within one week after transfection. In particular, the single cell clone was identified from a pool of stably transfected cells by measuring basic cellular properties employing forward scatter (FSC) as an indicator of cell size and side scatter (SSC) as an indicator for granularity of a cell

[0244] The method as described herein provides several advantages over the existing techniques for isolation of production clones and generation of stable and efficient production cell lines:
[0245] 1. Cuts back on time by at least 4 months (compared to a conventional method of using stable cell pools to perform limiting dilution serial dilutions and/or recloning of clones upon first selection)
[0246] 2. Uses basic cellular properties such as cell size and granularity to differentiate between transfected and untransfected cells
[0247] 3. When using an antibiotic resistance selection marker and a high antibiotic concentration during selection,
   [0248] a. any proliferation advantage during initial stages after transfection can be circumvented;
   [0249] b. due to limited proliferation in high antibiotics the variability between the isolated single clones are higher, as a result providing a better chance to isolate the “high producer”
   [0250] c. A linear correlation between copy numbers of recombinant DNA to protein production can be shown. Conversely, the survival of only those cells that have high integration events under the selection conditions is predicted.
   [0251] d. A generic pre-screening that utilizes antibiotic resistance as a tool to identify potential high producers is preferred.

[0252] The foregoing description will be more fully understood with reference to the following examples. Such examples are, however, merely representative of methods of practicing one or more embodiments of the present invention and should not be read as limiting the scope of invention.

### EXAMPLES

### Example 1

[0253] Generation of Single Clones Expressing Recombinant Intracellular Protein eGFP (Enhanced Green Fluorescent Protein)

[0254] Construction of a BAC-eGFP

[0255] For BAC-eGFP construction, 5 μg of the plasmid-eGFP DNA (Sequence IDXX, vector map in FIG. 10) was digested with fast digest restriction enzymes SfaAI (Thermo Fisher Scientific, cat. no. FD2094) and PacI (Thermo Fisher Scientific, cat. no. FD2204) (5U each) for 30 min at 37° C. The fragments were then resolved on a 1% Agrarose-TAE gel. The slower migrating fragment contained the gene-of-interest and the homology arms for BAC recombineering. This fragment was cut out of the gel and purified by Sigma Gel extraction kit (Sigma-Aldrich, part of Merck; NA1111-1K) according to manufacturer's instructions. The concentration of the DNA fragment was then measured using a UV spectrophotometer at 260 nm. 150 ng of the purified SfaAI/PacI fragment was electroporated into E. coli DH10b electrocompetent cells induced for recombination enzymes (material can be obtained from Gene Bridges GmbH, Heidelberg, procedures according to the pRed/ET manual by Gene Bridges) and containing the Rosa26BAC (can be obtained from the BACPAC Resources Center, Children's Hospital Oakland Research Institute (CHORI), Oakland, Calif., USA, clone name RP24-85L15), a BAC comprising the sequence of the Rosa26 locus (SEQ ID NO:1) using a Bio-Rad electroporator at 2000V/2 Ohms. The transformants were recovered for 70 min at 37° C. 100 μL of the transformation was plated on an LB-agar plate containing 12.5 μg/mL of Chloramphenicol (Sigma; C1919-5G) and 15 μg/mL of Kanamycin. The plates were then incubated overnight at 37° C. Positive colonies were picked for performing BAC DNA isolation in LB culture containing 12.5 μg/mL of Chloramphenicol and 15 μg/mL of Kanamycin. DNA isolation was done by spinning down the culture at 4000 rpm for 5 min. The cell pellet was resuspended in 300 μL of P1 buffer containing RNase A (Qiagen Miniprep kit; 12163) followed by 300 μL of P2 buffer. The tube was inverted 5 times gently at room temperature. Soon after, 300 μL of buffer P3 was added and inverted to mix 5 times and incubated on ice for 10 min. 600 μL of isopropanol were added and incubated at −20° C. for 20 min. The mixture was then spun down at 14000 rpm for 30 min at room temperature. The supernatant was carefully discarded without disturbing the pellet and the pellet washed once with 500 μL of 70% ethanol. The spinning was repeated at 14000 rpm for 15 min. The supernatant was discarded carefully without disturbing the pellet. The pellet was dried for 5 min and then solubilized in 30 μL of 10 mM Tris buffer [pH 8.0]. The integration of the linear fragment into the Rosa26 BAC was verified by digestion of the isolated DNA by EcoRI (Thermo Fisher Scientific; cat no. ER0271) for characteristic BAC fragmentation analysis. 20 μL of BAC DNA was digested with 1U of EcoRI for 30 min and resolved the products of the reaction on a 1% Agarose-TAE gel. Further, the integration was also verified by PCR analysis for (a) the 5′ homologous arm insertion site using a forward primer (AB11) that binds upstream of the integration site in the BAC and a reverse primer (AB12) that binds in the 5′ region of the incoming DNA fragment containing the gene-of-interest (in this case eGFP), (b) gene-of-interest primers that are specific to the eGFP fragment to ensure that the gene is present using forward primer (AB09) and reverse primer (AB40), and (c) the 3′ homologous arm insertion site using a forward primer (AB13) that binds in the 3′ region of the incoming DNA fragment and a reverse primer (AB14) that anneals to a region downstream of the integration site in the BAC. To isolate BAC DNA for transfection, a DH10b colony containing the confirmed modified Rosa26 BAC was inoculated into a 500 mL LB-medium containing 12.5 μg/mL Chloramphenicol and 15 μg/mL Kanamycin. The BAC DNA was then isolated using a NucleoBond Xtra BAC isolation kit (Macharey-Nagel; 740436.25) and the concentration was measured using a UV spectrophotometer at 260 nm. 6 μg of BAC DNA was linearized using 0.5U of PI-SceI enzyme (New England Biolabs; R0696L) to linearize the BAC overnight in a final volume of 10 μL.

Primers used for sequencing and/or PCR verification:

| Primer | Sequence | Primer description |
|---|---|---|
| AB09 | CAGGGGGACGGCTGCCTTCGG | Forward primer binds in CAGGS promoter |
| | SEQ ID NO: 7 | |
| AB10 | GCGAAGGAGCAAAGCTGCTATTG | Reverse primer binds in neomycin |
| | SEQ ID NO: 8 | |
| AB40 | GGTGGCATCGCCCTCGCCCTC | Reverse primer to screen by colony PCR |
| | SEQ ID NO: 9 | for integration and right orientation |
| | | ofeGFP fragment into pAB3 |
| AB11 | CCAACACAGATGAGCCTAAGCC | Forward primer to screen for |
| | SEQ ID NO: 10 | recombination at 5′ insertion site of BAC |
| AB12 | AACTAATGACCCCGTAATTGATTAC | Reverse primer to screen for |
| | SEQ ID NO: 11 | recombination at 5′ insertion site of BAC |
| AB13 | CATCGCCTTCTATCGCCTTCTTG | Forward primer to screen for |
| | SEQ ID NO: 12 | recombination at 3′ insertion site of BAC |
| AB14 | AACCTGAGCCAGACTTTCCACTGCAATATC | Reverse primer to screen for |
| | SEQ ID NO: 13 | recombination at 3′ insertion site of BAC |
| AB88 | GTGCGTGTTCACTCGACC | Reverse primer to screen by colony PCR |
| | SEQ ID NO: 14 | for integration and right orientation of |
| | | FGF23 (C-terminus) into base vector |

[0256] Transfection of Mammalian Cells

[0257] 1×10⁶ cells were transfected with 5 μg of GFP-BAC DNA for intracellular GFP expression. Expression of GFP was used to establish the protocol and to follow the different stages during transfection. On day 2 after transfection, cells were cultivated in the presence of 0.25 mg/mL G418 (Roth) for 2 days. After 2 days, G418 concentration was increased to 0.5 mg/mL and kept in selection for 2 more days. On day 4 after antibiotic selection started, the culture was split to two halves—for one half, G418 was retained at 0.5 mg/mL while for the other half the G418 concentration was increased to 1.0 mg/mL. Aliquots of the cells were analyzed periodically during antibiotics treatment by FACS analysis using Propidium Iodine staining as a marker for dead cells until the following criteria were met in order to decide when single cells were to be sorted into 96-well plates:
[0258] majority of host cell population shows signs of cell death due to toxicity with high antibiotica concentrations
[0259] small viable subpopulation (<5% of the total) of transfected cells are resistant under similar conditions
[0260] differences in FSC-SSC characteristics for live and dead population are clearly visible (FIG. 2)

[0261] 10 days after transfection, i.e. after cultivating and selecting the transfected cells in the presence of G418, cells were prepared for sorting by passing them through 100 μm cell strainer to remove any clumps, and sorted solely based on FSC and SSC by the flow cytometer FACS Aria III from Becton Dickinson with a Voltage setting of 140V for FSC-A and 250V for SSC-A. In a FSC/SSC plot (FSC-A on the x-axis, SSC-A on the y-axis), the asymmetric live gate is between 60 and 250 units in the FSC, and between 10 and 150 units in the SSC, starting narrow on the left bottom side and getting broader to the right and upper side (FIG. 3 upper panel). Although GFP expression was not used as a criterium for sorting, the GFP expression was recorded in the green fluorescent channel for the sorted live cells (FIG. 3, Histogram). The single cells were sorted into medium containing 96 well plates in the absence of lethal antibiotics concentrations. The best 96 cells out of 10⁶ cells transfected were sorted to result in a selection efficiency of about 1 in 10⁴. Single cells were expanded appropriately first in 96-well round bottom plate containing 50 μL of CD-CHO media supplemented with 1 mM Glutamine (Lonza), 0.2% Anti-clumping reagent (Invitrogen) and 0.001% Phenol Red (Sigma). After about 17 divisions, the cells were in sufficient number to characterize the clone, analyze for protein production and prepare freezer stocks.

[0262] After about 10 cell divisions (equates to 1024 cells), the individual clones were resuspended and transferred to 24-well plates containing 500 μL of supplemented CD-CHO medium. Following another 5 divisions, cells were analysed for their GFP expression by FACS analysis in the presence of PI as a marker for dead cells. For each clone, the GFP fluorescence intensity parameters, such as mean, median and mode were quantified and a box-and-whisker plot was created for analysis of the respective statistical parameters (FIG. 4). The result indicates that among the clones sorted according to our described method by flow cytometry, individual clones with higher expression levels (25% best clones) were selected, and these clones were not found among those generated by limiting dilutions. Thus, for this best 25% of production cells the selection efficiency was 2.5 cells per 10⁵ transfectants.

[0263] In a comparative example, it would be necessary to screen more than 100 clones with conventional techniques such as limiting dilution to identify such high producer clone (if any is generated or left from the cell pools) there.

[0264] In the present experiment shown, such high producer clones were not found via limiting dilutions, but with direct single cell sorting. Additionally, the average value for fluorescence intensity of the selected clones was increased with increasing G418 concentration during the early selection phase as can be seen by the comparison between the average value of the clones selected in 0.5 mg/ml G418 and 1.0 mg/ml, respectively.

### Example 2

[0265] Construction of a BAC with a FGF23 Expression Cassette for Secreted Expression of C-Terminal Fragment of FGF23

[0266] For construction of the FGF23-BAC, a vector containing all the necessary genetic elements in addition to the coding sequence of the C-terminal fragment of human FGF23 was used (FIG. 10B, SEQ ID NO:15) In short, the FGF23 gene was placed under control of the chicken beta-actin gene promoter followed by a poly-adenylation signal. The cassette contains a neomycin/kanamycin resistance gene. The cassette is framed by 3′- and 5′-homology sequences for recombination into the bacterial artificial chromosome containing the ROSA 26 locus.

[0267] For BAC-FGF23 construction, from the plasmid construct as described above, 5 μg of DNA was digested with fast digest restriction enzymes SfaAI (Thermo Fisher Scientific, cat. no. FD2094) and PacI (Thermo Fisher Scientific, cat. no. FD2204) (5U each) for 30 min at 37° C. The fragments were then resolved on a 1% Agrarose-TAE gel. The slower migrating fragment contained the gene-of-interest and the homology arms for BAC recombineering. This fragment was cut out of the gel and purified by Sigma Gel extraction kit (Sigma-Aldrich, part of Merck; NA1111-1K) according to manufacturer's instructions. The concentration of the DNA fragment was then measured using a UV spectrophotometer at 260 nm. 150 ng of the purified SfaAI/PacI fragment was electroporated into E. coli DH10b electrocompetent cells induced for recombination enzymes (material can be obtained from Gene Bridges GmbH, Heidelberg, procedures according to the pRed/ET manual by Gene Bridges) and containing the Rosa26BAC (the Rosa26BAC can be obtained from the BACPAC Resources Center, Children's Hospital Oakland Research Institute (CHORI), Oakland, Calif., USA, clone name RP24-85L15) a BAC comprising the sequence of the Rosa26 locus, SEQ ID NO:1) using a Bio-Rad electroporator at 2000V/2 Ohms. The transformants were recovered for 70 min at 37° C. 100 μL of the transformation was plated on an LB-agar plate containing 12.5 μg/mL of Chloramphenicol (Sigma; C1919-5G) and 15 μg/mL of Kanamycin. The plates were then incubated overnight at 37° C. Positive colonies were picked for performing BAC DNA isolation in LB culture containing 12.5 μg/mL of Chloramphenicol and 15 μg/mL of Kanamycin. DNA isolation was done by spinning down the culture at 4000 rpm for 5 min. The cell pellet was resuspended in 300 μL of P1 buffer containing RNase A (Qiagen Miniprep kit; 12163) followed by 300 μL of P2 buffer. The tube was inverted 5 times gently at room temperature. Soon after, 300 μL of buffer P3 was added and inverted to mix 5 times and incubated on ice for 10 min. 600 μL of isopropanol were added and incubated at −20° C. for 20 min. The mixture was then spun down at 14000 rpm for 30 min at room temperature. The supernatant was carefully discarded without disturbing the pellet and the pellet washed once with 500 μL of 70% ethanol. The spinning was repeated at 14000 rpm for 15 min. The supernatant was discarded carefully without disturbing the pellet. The pellet was dried for 5 min and then solubilized in 30 μL of 10 mM Tris buffer [pH 8.0]. The integration of the linear fragment into the Rosa26 BAC was verified by digestion of the isolated DNA by EcoRI (Thermo Fisher Scientific; cat no. ER0271) for characteristic BAC fragmentation analysis. 20 μL of BAC DNA was digested with 1U of EcoRI for 30 min and resolved the products of the reaction on a 1% Agarose-TAE gel. Further, the integration was also verified by PCR analysis for (a) the 5′ homologous arm insertion site using a forward primer (AB11) that binds upstream of the integration site in the BAC and a reverse primer (AB12) that binds in the 5′ region of the incoming DNA fragment containing the gene-of-interest (in this case FGF23), (b) gene-of-interest primers that are specific to the FGF23 fragment to ensure that the gene is present using forward primer (AB09) and reverse primer (AB88), and (c) the 3′ homologous arm insertion site using a forward primer (AB13) that binds in the 3′ region of the incoming DNA fragment and a reverse primer (AB14) that anneals to a region downstream of the integration site in the BAC. To isolate BAC DNA for transfection, a DH10b colony containing the confirmed modified Rosa26 BAC was inoculated into a 500 mL LB-medium containing 12.5 μg/mL Chloramphenicol and 15 μg/mL Kanamycin. The BAC DNA was then isolated using a NucleoBond Xtra BAC isolation kit (Macharey-Nagel; 740436.25) and the concentration was measured using a UV spectrophotometer at 260 nm. 6 μg of BAC DNA was linearized using 0.5U of PI-SceI enzyme (New England Biolabs; R0696L) to linearize the BAC overnight in a final volume of 10 μL.

[0268] Transfection into Mammalian Cells

[0269] 1×10⁶ cells were transfected with 5 μg of FGF23-BAC DNA for expression of secreted FGF23. On day 2 after transfection, cells were cultivated in the presence of 0.25 mg/mL G418 (Roth) for 2 days. After 2 days, G418 concentration was increased to 0.5 mg/mL and kept in selection for 2 more days. On day 4 after antibiotic selection started, the culture was split to two halves—for one half, G418 was retained at 0.5 mg/mL while for the other half the G418 concentration was increased to 1.0 mg/mL. 10 days after transfection during which the transfected cells were cultivated in the presence of G418, cells were prepared for sorting by passing them through 100 μm cell strainer to remove any clumps, and sorted solely based on FSC and SSC by the flow cytometer FACS Aria III from Becton Dickinson with a Voltage setting of 140V for FSC-A and 250V for SSC-A. In a FSC/SSC plot (FSC-A on the x-axis, SSC-A on the y-axis), the asymmetric live gate is between 60 and 250 units in the FSC, and between 10 and 150 units in the SSC, starting narrow on the left bottom side and getting broader to the right and upper side (FIG. 3 lower panel). The single cells were sorted into medium containing 96 well plates in the absence of lethal antibiotics concentrations. The selection efficiency in this example was again 96 cells out of 10⁶ total transfectants, resulting in about 1 out of 10⁴ cells, Single cells were expanded appropriately first in 96-well round bottom plate containing 50 μL of CD-CHO media supplemented with 1 mM Glutamine (Lonza), 0.2% Anti-clumping reagent (Invitrogen) and 0.001% Phenol Red (Sigma). After about 17 divisions, the cells were in sufficient number to characterize the clone, analyze for protein production and prepare freezer stocks.

[0270] After about 10 cell divisions (equates to 1024 cells), the individual clones were resuspended and transferred to 24-well plates containing 500 μL of supplemented CD-CHO medium.

[0271] Single clones were analyzed for production under fed-batch conditions in 96-well plates. For production, cells were seeded in 96-well plates at 1×10⁵ cells/well in 100 μL of production medium (supplemented CD-CHO described above was mixed with 15% Feed B CD-CHO (Invitrogen) and 3.3% Function^{MAX} titer enhancer (Invitrogen)). The plates were incubated without shaking. Feed supplement was added to culture every 2 days (Feed B CD-CHO at a concentration of 10% culture volume and Function^{MAX} titer enhancer at a concentration of 3.3% culture volume). Cultures were spun down at the end of 8-days and collected the supernatants for analysis of secreted proteins by ELISA. As with GFP analysis, a similar setup was performed for FGF23 by limiting dilution for comparison. Specific productivity for both methods was analyzed by an FGF23 ELISA (Biomedica, Austria) according to the manufacturer's instructions. The pcd values for the individual clones of the respective group were statistically analysed and plotted by a box-and-whisker plot and scatter plot, respectively (FIGS. 5A and 5B). The volumetric yield for each clone was calculated and the correlation between pcd values and volumetric yields of these clones were analysed (FIG. 6). The results show that the mean value for specific productivity of clones sorted by flow cytometry was about 10 times (1 log) higher than the mean value of those clones sorted by limiting dilution. Again this demonstrates that the screening efficiency to identify high producers is strongly improved.

[0272] The gene copy number for the GOI for the individual clones correlates well with the specific productivity of the POI. Thus, the correlation between the gene copy number of the GOI and the gene copy number of the marker gene is of interest. This can be tested using real time PCR with specific primers for the respective gene. The results from RT-PCR show a correlation between these two genes according to FIG. 7.

[0273] In order to test the functional correlation between the POI production and the marker gene function, selected clones producing recombinant FGF23 with determined pcd values were analysed for their survival under high antibiotic concentration. For this, 1×10⁵ of cells/well were seeded in 100 μL of CD-CHO medium (supplemented with L-glutamine and anti-clumping reagent) in 96-well plates. Cells were treated with 6 mg/mL or 10 mg/mL of G418 for 3 days. As controls, the cells were cultivated in a similar setup without antibiotics. Cell viability was measured using Abcam Cell Cytotoxicity assay kit as per manufacturer's instructions. 20 μL of cell cytotoxicity reagent was added to each well and incubated for 3 h at 37° C. An increase in absorbance at 570 nm coupled with a simultaneous decrease in absorbance at 605 nm indicates the presence of live cells. A ratio of live cell population observed in antibiotic-treated samples to untreated controls for each clone provides an insight into how much antibiotic a cell can tolerate (FIG. 8). A correlation between increased productivity and resistance to high antibiotic concentration was observed. The data demonstrate that a generic screening method based on resistance to high antibiotic concentrations can be used to pre-screen the large sample size to a relatively small number for further testing.

### Example 3

[0274] Identifying Early Timepoints for the Generation of Single Clones Expressing Recombinant Intracellular Protein

[0275] Several aliquots of 1×10⁵ or 1×10⁶ cells were each transfected with 5 μg or 25 μg of GFP-Rosa26-BAC DNA (either circular or linearized in the BAC backbone with SceI) for intracellular GFP expression using Amaxa Nucleofector kit. Expression of GFP was used to evaluate protocols for improving transfection and selection conditions and to follow the different stages during transfection. On day 1 after transfection, 1.0 mg/ml G418 (Roth) was added to the culture medium and cells were continued to be cultivated in the presence of 1.0 mg/mL G418. Aliquots of the cells were monitored from day 3 until day 9 post-transfection by FACS analysis, and beside the Forward Scatter and Side Scatter characteristics, Propidium Iodine staining was used as a marker for dead cells.

[0276] Only live cell population was gated and the gated cells were further divided into 3 categories—no GFP expression (<100 arbitrary units of fluorescence signal intensity) equivalent to the negative control of CHO cells without GFP expression, low GFP expression (between 100-10,000 arbitrary units of fluorescence signal intensity) and high GFP expression (>10,000 arbitrary units of fluorescence signal intensity). GFP signal intensity for each category above was monitored from day 3 to day 9 and % for each category was calculated by dividing the number of cells within the category by the sum of the cell numbers within all three categories. Comparison of cell-to-DNA ratio showed that 5 or 25 μg of DNA can be used for transfection, and the cell number can vary between 1×10⁵ to 1×10⁶ cells. Using 5 μg Rosa26-BAC DNA for 1×10⁵ cells showed in this experiment better transfection efficiency than using 25 μg DNA for 1×10⁶ cells. When 1×10⁵ cells were transfected with either 5 μg of linear or circular DNA and selected from day 1 on after transfection with 1.0 mg/ml G418, 6-9 days after transfection (which corresponds to 5-8 days after start of the selection) were observed as good time points for flow cytometry sorting of the remaining viable cells (FIG. 9A for transfection with the circular BAC and FIG. 9B for transfection with the linear BAC). From day 6 post transfection on, at least 50% of the viable cells belonged to the high expressing cells. This fraction of high expressing cells in the viable cell population was increasing to about 80% for the linearized BAC, and to 100% for the circular BAC. In the case of the circular BAC, this means that from day 6-8, 1 to 3 cells out of 10⁴ cells are the cells of interest, showing high expression for our protein of interest (Table 1). For the linearized BACs, 427-332 cells out of 10⁴ cells are the cells of interest, showing high expression for our protein of interest.

TABLE 1
Cell counts obtain in the various gates from the
transfected cells as described in example 3 and in FIG. 9.

| | | GFP intensity | | | | |
|---|---|---|---|---|---|---|
| | | no | low | high | VCC | TE |
| 1E5/5 μg/circular | Day 3 | 3050 | 448 | 143 | 3641 | 10000 |
| | Day 4 | 296 | 61 | 25 | 382 | 7035 |
| | Day 5 | 85 | 36 | 30 | 151 | 10000 |
| | Day 6 | 0 | 5 | 11 | 16 | 10000 |
| | Day 7 | 0 | 1 | 1 | 2 | 5845 |
| | Day 8 | 0 | 0 | 1 | 1 | 10000 |
| 1E5/5 μg/linear | Day 3 | 1119 | 302 | 59 | 1480 | 5250 |
| | Day 4 | 1486 | 379 | 172 | 2037 | 10000 |
| | Day 5 | 655 | 308 | 166 | 1129 | 10000 |
| | Day 6 | 83 | 136 | 208 | 427 | 10000 |
| | Day 7 | 5 | 96 | 231 | 332 | 10000 |
| | Day 8 | 8 | 74 | 284 | 366 | 10000 |

GFP intensity definition used: “no”: less than 100 arbitrary units of fluorescence signal intensity “low”: between 100-10,000 arbitrary units of fluorescence signal intensity “high”: more than 10,000 arbitrary units of fluorescence signal intensity
VCC: viable cell count
TE: total events

[0277] Material and Methods:

[0278] Transfection of host cell lines (Nucleofection): Mammalian Host cells, specifically CHO-K1, were cultured in appropriate commercial cell culture media (CD-CHO; Invitrogen) until the day of transfection. On the day of transfection, logarithmically growing cells were counted and 1×10⁶ cells were resuspended in 100 μL of Amaxa Nucleoporation buffer (Lonza). Resuspended cells were transferred to a nucleoporation cuvette (provided with kit). The sequence for GFP or FGF23 (SEQ ID NO:5) was introduced into plasmid or a BAC vector comprising locus Rosa26 (SEQ ID NO:1), see Zboray et al. 5 μg or 25 μg of plasmid DNA or BAC-DNA was pipetted into the electroporation cuvette containing the cells and the cells were electroporated according to the manufacturer's protocol. Transfected cells were immediately transferred to a 6-well plate containing 2 mL of fresh prewarmed medium. Antibiotica were added at lethal concentrations 1 or 2 days post-transfection.

[0279] Transfection of Host Cell line (Lipofection): Mammalian host cells, specifically CHO-K1, were cultured in appropriate culture media (CD-CHO; Invitrogen) until the day of transfection. 15 μL of Lipofectin (Invitrogen) was incubated with 5 μg of DNA for 30 min at room temperature for complexation. The lipofectin-DNA complex was then slowly overlaid on to 4×10⁵ CHO-K1 cells in a 6-well plate containing 2.5 mL of CD-CHO medium. All steps were followed according to Manufacturer's instructions. Cells were cultivated and allowed to recover for 1 or 2 days at 37° C. before the addition of lethal antibiotica concentrations.

[0280] Limiting dilution for production clone isolation: For limiting dilution of production clones out of cell pools, 4×10⁵ cells were transfected with lipofectin/5 μg BAC DNA as described above. The selection was done starting with 0.25 mg/ml G418 (Roth) 2 days post-transfection and gradually increasing to 0.75 mg/ml. Stable pools were generated within 16 days post-transfection. Cells were diluted to 0.5 cells/well and seeded in a 96-well round-bottom plate containing 100 μL of CD-CHO supplemented with L-Gln, phenol red, anti-clumping reagent and 0.1 mg/mL G418. Cells were expanded as mentioned earlier and analyzed for specific productivity (pcd) in case of secreted proteins or fluorescence intensity in case of intracellular expression of green fluorescent protein.

### Example 4

[0281] Comparison of a Conventional Plasmid and a BAC for Recombinant Protein Expression in Individual Mammalian Cells of a Cell Population and Cell Pools Respectively Early After Transfection and After Prolonged Culture

[0282] a) Plasmid-eGFP

[0283] A plasmid able to express eGFP in mammalian cells was constructed. The plasmid comprises the eGFP sequence driven by a the Caggs-promoter and an optimized Kozak-sequence just upstream of the eGFP start codon. The vector map is shown in FIG. 10.

[0284] b) BAC-eGFP Construction

[0285] For BAC-eGFP construction, from the plasmid-eGFP construct as described above, 5 μg of DNA was digested with fast digest restriction enzymes SfaAI (Thermo Fisher Scientific, cat. no. FD2094) and PacI (Thermo Fisher Scientific, cat. no. FD2204) (5U each) for 30 min at 37° C. The fragments were then resolved on a 1% Agrarose-TAE gel. The slower migrating fragment contained the gene-of-interest and the homology arms for BAC recombineering. This fragment was cut out of the gel and purified by Sigma Gel extraction kit (Sigma-Aldrich, part of Merck; NA1111-1K) according to manufacturer's instructions. The concentration of the DNA fragment was then measured using a UV spectrophotometer at 260 nm. 150 ng of the purified SfaAI/PacI fragment was electroporated into E. coli DH10b electrocompetent cells induced for recombination enzymes (material can be obtained from Gene Bridges GmbH, Heidelberg, procedures according to the pRed/ET manual by Gene Bridges) and containing the Rosa26BAC (can be obtained from the BACPAC Resources Center, Children's Hospital Oakland Research Institute (CHORI), Oakland, Calif., USA, clone name RP24-85L15), a BAC comprising the sequence of the Rosa26 locus (SEQ ID NO:1) using a Bio-Rad electroporator at 2000V/2 Ohms. The transformants were recovered for 70 min at 37° C. 100 μL of the transformation was plated on an LB-agar plate containing 12.5 μg/mL of Chloramphenicol (Sigma; C1919-5G) and 15 μg/mL of Kanamycin. The plates were then incubated overnight at 37° C. Positive colonies were picked for performing BAC DNA isolation in LB culture containing 12.5 μg/mL of Chloramphenicol and 15 μg/mL of Kanamycin. DNA isolation was done by spinning down the culture at 4000 rpm for 5 min. The cell pellet was resuspended in 300 μL of P1 buffer containing RNase A (Qiagen Miniprep kit; 12163) followed by 300 μL of P2 buffer. The tube was inverted 5 times gently at room temperature. Soon after, 300 μL of buffer P3 was added and inverted to mix 5 times and incubated on ice for 10 min. 600 μL of isopropanol were added and incubated at −20° C. for 20 min. The mixture was then spun down at 14000 rpm for 30 min at room temperature. The supernatant was carefully discarded without disturbing the pellet and the pellet washed once with 500 μL of 70% ethanol. The spinning was repeated at 14000 rpm for 15 min. The supernatant was discarded carefully without disturbing the pellet. The pellet was dried for 5 min and then solubilized in 30 μL of 10 mM Tris buffer [pH 8.0]. The integration of the linear fragment into the Rosa26 BAC was verified by digestion of the isolated DNA by EcoRI (Thermo Fisher Scientific; cat no. ER0271) for characteristic BAC fragmentation analysis. 20 μL of BAC DNA was digested with 1U of EcoRI for 30 min and resolved the products of the reaction on a 1% Agarose-TAE gel. Further, the integration was also verified by PCR analysis for (a) the 5′ homologous arm insertion site using a forward primer (AB11) that binds upstream of the integration site in the BAC and a reverse primer (AB12) that binds in the 5′ region of the incoming DNA fragment containing the gene-of-interest (in this case eGFP), (b) gene-of-interest primers that are specific to the eGFP fragment to ensure that the gene is present using forward primer (AB09) and reverse primer (AB40), and (c) the 3′ homologous arm insertion site using a forward primer (AB13) that binds in the 3′ region of the incoming DNA fragment and a reverse primer (AB14) that anneals to a region downstream of the integration site in the BAC. To isolate BAC DNA for transfection, a DH10b colony containing the confirmed modified Rosa26 BAC was inoculated into a 500 mL LB-medium containing 12.5 μg/mL Chloramphenicol and 15 μg/mL Kanamycin. The BAC DNA was then isolated using a NucleoBond Xtra BAC isolation kit (Macharey-Nagel; 740436.25) and the concentration was measured using a UV spectrophotometer at 260 nm. 6 μg of BAC DNA was linearized using 0.5U of PI-SceI enzyme (New England Biolabs; R0696L) to linearize the BAC overnight in a final volume of 10 μL.

[0286] c) Transfection into Mammalian Cells

[0287] 600,000 CHO K1 cells (CHO-K1-AC-free, from Sigma-Aldrich, cat. no. 13080801) were transfected with either 5 μg of plasmid-eGFP or BAC-eGFP also containing a G418 selection marker as previously described (Zboray et al., 2015):

[0288] Transfection of linearized BAC-eGFP plasmid and plasmid-eGFP respectively was performed in CHO-K1 cells using Amaxa Nucleofector V kit (Lonza; VCA1003). Cells in the growth phase were first counted using a CASY counter. 600,000 cells were spun down at 1200 rpm for 5 min. The supernatants were discarded and the cells were resuspended in 100 μL of nucleofection kit V containing supplement 1. 8.5 μL of the linearized BAC-eGFP or of the eGFP-plasmid were added to the resuspended cells and mixed gently by flicking the tube. The contents were then transferred to a Nucleofection cuvette and nucleoporated using program U-023. Immediately after nucleofection, 500 μL of pre-warmed stock CD-CHO medium was added to the cells and transferred using a Pasteur pipet (provided by the Manufacturer) to a 6-well corning plate containing 1.5 ml CD-CHO medium. The stock CD-CHO medium had been prepared by mixing 1 L of Chemically-defined CHO medium (Thermo; 10743-029), 40 mL of 100 mM ultraglutamine (Lonza, BE17-605E/U1), 2 mL of anti-clumping agent (Gibco, 01-0057DG) and 2 mL of phenol red (Sigma, P0290).

[0289] d) Determination of Expression

[0290] On day 2 after transfection (day 2 p.t.), the cultures were analyzed via FACS (FACSCANTO II, BD) to follow eGFP expression and split into two aliquots.

[0291] Cell pools analysis (aliquot 1): from day 2 p.t. on 0.75 mg/mL of G418 was added to the culture. Viability and eGFP expression was recorded at day 9 p.t. by FACS after transfection and at day 21 after transfection (day 21 p.t.). The percentage of eGFP positive cells as well as the MFI (mean fluorescence intensity) of the eGFP positive cells were determined.

[0292] Cell clone analysis (aliquot 2): the transfected cells were prepared for sorting by passing them through 100 μm cell strainers to remove any clumps and were sorted on a FACS ARIA III based on eGFP expression of cells in the live-gate (by FSC/SSC) by setting the lower limit of the fluorescent gate at the arbitrary fluorescent units 10000. The live-gate on the FACS ARIA III with a Voltage setting of 140V for FSC-A and 250V for SSC-A was set asymmetrically with FSC between 60 and 250 units, and SSC between 10 and 150 units, starting narrow on the left bottom side and getting broader to the right and upper side. 96 cells of each pool were sorted into medium containing single wells of a 96 well plate in the absence of antibiotics. Single cells were expanded without any antibiotics selection appropriately first in 96-well plate containing 100 μL of CD-CHO media containing above-mentioned supplements and then transferred into 24 well plates containing 500 μl of the same medium. On day 21 after transfection (day 21 p.t.), those clones, which recovered and could be expanded, were again analyzed for eGFP expression via FACS. The clones with an MFI smaller than 6000 were grouped as no or low eGFP expression, those with an MFI between 6000 and 60000 were intermediate eGFP expressors, and those with and MFI higher than 60000 were high eGFP expressors.

### e) Results and Conclusions

[0293] Analysis of pools of cells transfected with an expression cassette on either a conventional plasmid or on a BAC with a large euchromatin locus, respectively:

[0294] Table 2 shows a comparison of pools of transfected cells, transfected either with an eGFP-expression cassette on a conventional plasmid or with an eGFP-expression cassette within the Rosa26 locus, an exogenous euchromatin locus on a BAC, respectively. The pools are cultivated under antibiotic selection pressure. The antibiotic resistance gene marker is provided along with the eGFP expression cassette.

[0295] 2 days after transfection (day 2 p.t.) the percentage of cells positive for eGFP is lower in the BAC transfected culture as compared to the plasmid-transfected culture (0.5% vs 2%), however, both transfected cell pools show similar fluorescence (MFI around 6,200 and 6,600 respectively). This is already an indication that the BAC-transfected cells have a higher specific expression of eGFP as compared to the plasmid-transfected cells in the pool.

[0296] 9 days after transfection the viability in both cell pools is similar (3% vs. 4%), however, the number of clones expressing eGFP is much higher with the plasmid-transfection (20%) as compared to the BAC-transfection (3.3%). This is an indication that with the conventional plasmid transfections, most of the eGFP-positive cells have already died due to the selection pressure.

[0297] The culture transfected with the BAC-eGFP show a similar number of living cells (4%) and eGFP-positive cells (3.3%), indicating that all cells that produce eGFP are alive. Moreover, the mean fluorescence intensity (MFI) of 184,000 produced by this BAC-transfected cell pool is significantly higher than the MFI of the plasmid-transfected pool (78,000).

[0298] These results of the pools clearly show that the probability to find stably and highly producing clones within 9 days is extremely low for conventional plasmid transfections. At the same time it indicates that there is a high probability to find a highly producing clone within 9 days after transfection with a construct containing the expression cassette with the gene of interest in a large euchromatin locus. It is also feasible that such advantageous results are found within 12 days after transfection, however, after such 12 days' time period the risk of undesired proliferation of single cell clones within the pool is higher, resulting in higher screening and characterization efforts for individual clones.

[0299] Analysis of single cells transfected with an expression cassette on either a conventional plasmid or on a BAC with a large euchromatin locus, respectively:

[0300] Table 3 shows that 2 days after transfection, BAC-transfection resulted in significantly lower fraction of eGFP-positive clones (0.5%) as compared to plasmid-eGFP transfections (2%). However, after random sorting of 96 highly producing eGFP-positive clones from each transfection one can observe a significant difference of the eGFP expression levels of the clones 21 days after transfection. Although the level of clones recovered is similar (35 out of 96 vs. 41 out of 96), the expression level of clones is significantly different: Plasmid-eGFP clones showed mostly (37 out of 41, i.e. 90%) low expression levels (MFI<6,000). Only 10% (4 out of 40) show medium levels of expression. This is well known and the reason why it is in most cases necessary to do gene amplification and prolonged cultivation for stable clones.

[0301] BAC-eGFP transfection show surprisingly a significant level (15 out of 35, i.e. 43%) of very highly producing clones (MFI>60,000) and medium producing clones (19 out of 35, i.e. 54% with MFI between 6,000 and 60,000).

[0302] Taken together, this is a surprising finding as one would have expected with the BAC-transfections a decline in expression levels after transfection similar to what is seen for the simple plasmid transfections. Due to the obviously stable and highly expressing clones in the transfections with the gene-of-interest in a euchromatin protein expression locus, it is possible to enrich with very stringent methods shortly after transfection for these clones (e.g. by antibiotic selection pressure and/or by sorting according to expression levels).

TABLE 2

| | | day 2 p.t. | day 2 p.t. | | day 9 p.t. | |
|---|---|---|---|---|---|---|
| | number of cells | % cells positive | MFI of culture | day 9 p.t. | % cells positive for | day 9 p.t. |
| aliquot 1 | transfected | for GFP | after 2 days | % viability | GFP after 9 days | MFI of culture |
| pool- | 600.000 | 0.5 | 6200 | 4 | 3.3 | 184000 |
| BAC | | | | | | |
| pool- | 600.000 | 2.0 | 6600 | 3 | 20.0 | 78000 |
| plasmid | | | | | | |

TABLE 3

| | | | day 2 p.t. | | day 21 p.t. | day 21 p.t. | day 21 p.t. |
|---|---|---|---|---|---|---|---|
| | | day 2 p.t. | cells eGFP+ | day 21 p.t. | GFP positive | GFP positive | GFP positive |
| | number of cells | % cells positive | sorted (gate | clones | clones | clones | clones |
| aliquot 2 | transfected | for eGFP | cutoff >10000) | recovered | MFI < 6000 | 6000 < MFI < 60000 | MFI > 60000 |
| clones | 600.000 | 0.5 | 96 | 35 | 1 | 19 | 15 |
| BAC | | | | | | | |
| clones | 600.000 | 2.0 | 96 | 41 | 37 | 4 | 0 |
| Plasmid | | | | | | | |

The application's sequence listing, which the Patent Office published only in electronic form, follows.

SEQUENCE LISTING (15 sequences)

SEQ ID NO: 1 - DNA, 205838 bp, Mus musculus
gtgatgagccgccatggaggtggtaggaattggagtcaggtcttctgcaggagcagccagtgttctaacctcagagccagccctccagcctttgtgggaattttctatattatgaatgtctctgtaataaataaatcaattcttcaagcctatgagtgtagagagccgtgccacaagcaatcgccattataagatggtgctggcttcccctgtgcctaactagtaaacaagccttgtgcacaagtgcgagagtgaactcacgcatagtcactgcccatctcggggcatagtaatgaggtgatgggtgagcaacaaatcaggagctgacatgccacatcaggtgctgaaacaccacgctgagggctatataagcagcaccattttccggggtctgggtcttccctccttaagaagcaataaagcttgccgcagaagaatccggttgtccgagtgtgttcttgcctgcgagaacgatagctcgggacatatgagaagaacaccaagagcctggatagaagtcagtgaagtctgtgattgacaggcaacagaaagggagctgcatatgaatattacacactccactcatgatcagcatctatcaggtatggctagatccaggcaacaggacactgtgtctttctctaattctccgtcttgccttcctgtagggtagcaggctctcccccataaaatggtaaaagagaccccagcggctctaagttctctcagcctgtcaatcccagcaataaagacttttccccagaaattcctataaatattctgggaatggtcaactagcataggctagcccagaaccatggatatcatggataaggggtaggaacatagtaagcctgccctgaggctatgttccaaatgatcaacttggccccagaggtagaatgagttcccaaaagaggatcgaggtgccattccagaaggaaaaggatgcacaaaaatcaacatcttgtctgctaagaaccacttagcaggaataagatccacttagaatgggacatgcaggacagacatgtaacagaagtgccacacatggcataacatcatctggaaccttctcatccaaagccacaacttgaaccaggcctgactgctcccaggagactggggaaaggaaggtacagacattccaaagctaatacaggagagagtcaggcaggaattcaggacatctgacccgacatcagtatcctgtctctacacacgcacacgcacacgcacatgcacacacacactaagtagctgctgaaagacacctgcagcctgaggctaaggatgtggctctattggtagagtgcttgcctctctgcctaaagccccaagttccatctctagcactgcataaaccagaagtggtggcacatgccactaattctatcgctcaggacacagatggaagagaaggggaagtcaaggttatcctcaactgcgtagtgagagtgaggccagtatgaggtaaataagaccctttctcaagaaaggaaaggggagagacagagaatgagagcgagaatgagagtgaaagagagagagagagagaaagacagagacagagaaacagaaagacagagagagagagatacagagatgcctttagcacttggaaggcaatcgcaggtggacctgtgtgagtccaaggttagcctggtcacttagtgagttccgcagtaaaatccagtctcaaataaataaaagtaagaaaaaaggaaagggagagagagagagagggagggagggagggagggagggagggagggagggagggagggagggagggagggaggaaaaaaggaacaaacagagacactgagaaagagttgggggagagcaaggaagttgggcagagaaacagtaaggaaaggaaggaagaaagaccaggaaatttgtctcttagccatcaggccccgacactgagcatgtggtagcgtctaggggatactgcagaagtcctatgcctttccaagaagaacatgttccattagacagcccagatgtcccccttcaccatctaaggactgagcagccccagggacagtgattcacagatggcttctgtgtcctgatcctgactcgggaacagaggaccaggcattcaaacactggagcttgtggcttcgtggccaaccgagtttgcatgcttctaaagagaacgaagcatttggattgtggcattcgctgtgtttggcattcgccatgtttgagatcttatctgtgcaagcggaccagccaccccatccgcacccctcacggtccccagggcatgaagtgtgtctctgagagttactgagaagaggctcggagtgtcccctctttctttcctgaccatcctgcttggaaggaagcactgtcctgtccctgcatagaggagcctcctagagcctccagccatgtgggagagccatgtgcaatccttggatggttggctgccctttcccatacacctcaaaccgtgtcctgtaacctggcttttgttcctaattaagataacattctgtggctgctaagatggctcagtggctaagggtgctgactgctcttctagaggaccctggtttgatttctaacacccacatggtggctcccaacagtctgggactctggtctcaggggaaatgatggcctcttctggcctcaaaacaggtaatgcacagacaaaagactctatattttaaaaaattattaaattattatatattttttaaaattctaaaagcaaaccctgctgcaaggtctcactctgcagctcaggctagcctcaaatcgggttcccacgtgtgtgccaatcatagcctgcaatagattttcctttttaattctaaagtactggacatgcaatggttaaatgtccatgtgtcccctattcatatattcatgaatagcacaagcatggcaggatgtagagatgggcctgtgggaagaaatggggattaaatgaagttaggagggtatgaggtggatcattttgttggggttagcaccctgaaagaaaaagagcagcagaaagcaactatttttaatctctctctctctctctctctctctctctctctctctctctttctctctctccctgcctccctccctctctcccctctaaaaacagaagaaaaagaaagttgccatctagaagccaagaagaggccctcaccagagcatggccctgctgtctgacctcagactcaataccgtatcctctaccactgtgaggaaatgtaatgttagataaggcatgcggtctgtgggatgcagtgtggcacttgggacaggaagcctaaaggatcactgttttcacattgttggaaacattgtgacagtgaaggaaagaaaggcattgatgaggaaaagcagctcaccctaatgggatgcaccaacagtttttatgaattcatttactcactcattcaacagatccctcctaagtagctatgtggaggagatcgtgagttaaacatgctcacaaactaggcaggtgttgtccctactgtcccaaagatcacaagcaaacaagcaataataattcaacataatgggaaaagttcaaggtggtccaaggtctcacagtaagaccacccgagggctaagtggaaatagtgcctacctagtcttcagtaagtcctaggttggagggagccccagagacataaaattggctgtggtgatgcacagctataccccagctctaggaaggtggaagtagggggggtcagaagttcaaggtcaacataaacctgtctttaaaaaaaaaaaaaagaccaagaagggcatggtggtgcacacctttaatcctagcgcagaggcagaggatctttgtgagttccaggccagcctgatctacaatagcaagtcccaggccagccaggacaacatagtaagaccctgtctcaaaacaaaacagagccagataagatgtatgctgttgtgctggaaagtactgccttgctgtctcctgtgtcttctcaatggaatcacccaccaggtgttattgatgtctttcttcctttctttctttttccagatgagaaattgcctcccacaaaatagccagcaggaatgtggtctccctctggggctagctgcttcctctttgtcttgtgatgccaagacctcaacatctctcactagagcaccttcaatagctccctcctggcttctctgcctctgtttttgcccctctactaaccttttaatccaggagccagaccaatatgtgtagcaaatcatatcatcctcttgtggcctccacttggaattgaatgcgtactcttccccttggctcctcatggctgggcctccacccagtatctgaccccatctcacacctctttccttcctgctgcccgagccctgacatatatatccatgcatgcatacatacacccatacatagagatatacatgcatacatagttcttttctagaatgcttcaaatattggctgctcaagtagctgctcctgagacctttgctggtgctctcctctcagagagctatgcccacacttcctttccaaatggcaactctagcatacgtcaagtgttgccttcttcattgcatgacaacatctgaagttcattactgttgcatcagttcgcataatgactgtttccattctctaccgctccgatccccaccaggccagaatgtctgagataattttgtgtgatggtggaaataccctatatctatgctgtccactgtgatattattcggggtagcttctgagcactctaaacacaacagatctgactgcagaatgaactctcatgtgggttttatttttaggagttgaaatgcagagctgtgtgtggatggggggaggggttagtggtggtagtttgaatgaacctgaccccataggctcataggaagtggcaccattagatatggccttgttggagtagatgtggccttgttggaggaagtatgtcactaggggtgagctttgaagaagagttgtctcttcatagcaatagaacactgactaagacaatgccctagcagagcccccgaaggacgtaagggggcagggggtcatgtctgtgattgtctctcctagaacagtacccgacatgtatcatacagttggaaaaaacgtgtccacactacacaaatacagacaaacgaaacccccctgggacctcacttggttctcctccccctgtcagtgaagcctctgcaccccgatccccaccagagtttgctgcactgaccttaggtatttggcagaagcaccaggtgccagggcagcagagtcaattactccctccactgcactccatttggagcccgacgccccctgtgcggaggtggggtggtaatgaggccttaccaggctccggtaaaagctgcagctgtttcctatccagtcatctgggctttatggaatgtggaaagagccaggcctataaatccatgtgaattgttctattcgtctctgtctcctcctcctcctcctcctcctcctcctcctcctcctcctcctcctcctcctcctcctcctcctctccccctccccccgcctcctcccctgtgtaatgttggaaagcaggaggagggagaataagtcagtgtcaggtcaagaggctgaattcaattaaaacggtttttggactcaatcgctttaggaaatgaaatcaacattaggctgaataatatatttttttgcaagttagggtcccttctgggttctctttaagcagaaagataattcagaacagacgttaagtccagttttatgtcaactcagtgaggattaggtcatctacattaacccatagtgctaagatcaacttccccagcaccacggcctctccaacagccctaagtgaggactgagaaagattcagcctccagggcttctagaaagtaccttgtgaaagtgtccagggctacacaggtagacacagaggctttgaggtatcaacgaaaacagagaatccgagtccagagacaactgtttaagagacaggataaacagagctcaactccacaaaaatggctcacagattgtgcatcccagaaaagccaggtcttgctgcaggcaataaacgtgggaaggggtctagtgctaaatgatcagaaggaagctccaaggcctgaaccaagaggccggggtgcacttatgagggaggccacagcagttaagtgtgactgcttagctttctgaggtacagctctgagaactgccagtgatgtgatctagggtcccacagcaaaacagatctctcccaggaatacatttttacctgggttttatttaaagggttggaatgtgaagagccacatgtggccacaagttggtgcactagaccgagccactccccactgtaaggaggcagagaccagtggggtctatgattatctcccacgtagcagctttcgccttggcatttctgggggaaagtgtctgtgatgcagtggggatggggcacaccctggcatcgaggacaatgctccagagtacaggtgagctgaaatgcctccgctggcatttaggaagccctgacaatgtgctagcttgaacacaaaatcattgtcaatataatcccaaagttgtcacgacagctctaaaataacatccccatctcacagattagaaaaagtgagggctgggctctgagaggttaagtcgcatgtcacactggagagactcgtggaaagctgaggtggctgctagccaactcgaagtaaggatctgagaccttcatttcaacagtctataagaaggtgtgtcctatcaaaactacagatgtcattttaaaagagaactggccatggaccgagctgtgtcccccacaaatcaagcccatatgtgggtctgatggtgtttggagaggtaggtcgtcagtttgaggagtttcaagataggataagtgtccttagaggaccaaaaagaaaagatggttctcaaatgctgttatagcaaaaatctgccaggcttcttaacctatttctgaaccctacattgctgttaagagacctggaaattttatatatctagattctctgaagttgccagtctggataccatactttgagaacctcttttaaacaatataccaacagggctgggaaagtgggtcactgagtccagcatttgcgatgcatgcatgggaaccagaggtctgagaaagtgggtcagtgggtccagcatttgccattcatgcatgggaacctgaggtctgagaaagtgggtcagtgggtccagcatttgccatgcatgcatgggaacctgaggtctgagaaagtgggtcagtgggtccagcatttgccatgcatgcatgggaacctgaggtctgagaaagtgggtcagtgggtccagcatttgccatgcatgcatgggaaccttagagagaattcccagaacctatgtaaagctatgtaagaagcacatatctgtaatctcagaactcctatcatgtgacaagaggcaaaaccaggagaattcctggaaacccgtgggccagctaccctggcctacatagctgtgaacaaataaagtagaagataaggactaacacagaagttgtcctttgatcttcacatggactctggggcacacacaaaaacacatacacgcacatatcaaaacacacatatacacaagtcatacctattccgtgtttacctataggaagtggctctaaggataatatttttgagactataatatatcgttttccccttccctttcctctccctaaaccctcccttatatccctccttgctctctttcaagttcatgggctgttttcttcattaactattgttacctgcacatatgtatatacaaatatgtttctatatataatctgttcagtccacatgatgttattgtaggtgtgttttggtaccagataaccaactgctgtggtcttccctgtgtagggcagcttctccacccctcagctttccttagttgcctgtaggtttttgtgtagggttgaggccttcggtgttttcccaagtactccagcattccggttcttgttgtatttgttcattcaggtcatgattacaccatcagggtgttaagacttcacagtgcagcttctgactgccctgacacagtctcacagaaaacttactgatcatctgtgtcttacaacctgtctgcctcatcttccccagtgatctctgagccttaggtgtaggagttgtactgtagatgtatcattgggacagtgcccgacagtataacagtacccgacatgtaccctgtgattgaaaaatatgttctaaaactctgcatttttattgtttctaattttctgtaattgtgtctgtctgctacaaagagatgtttccttggtgagtggtgaggactacactcatctgttttttcaagaacaaacacttagaatgcagctaggggttgtaaagtgatagttatagatttttcctccaaggcccatgactttaccagccctgggtagatggctaagtttccagtaccaggcatggtttctctcatgttgagcaagatttaagtccaattagagggctgctggttacagccaagacatgtgtaccactattgcagccttaggcttattgtgtcattctggtctttgctgtggtttatagatatcatagctgggtaggattgatggttgcttccctcatttagaagcttgcatggttctttctggtgccatgaaagtttgtcctcggcaagaaggctttcaaatcaattccagctcaggggtgtcaggccctacatctgaagtatatcagtaggaactcactttacacctctggggagcaatcaatggcaatgacaatagtaatgtgatgtttggaagtctcttggacaaccctgaccaatactcaaaagagggctttgtatgtctggtattgcagttttgttagatgttctttatctcttggagggaggattgtatgtgggacaatcgaccgtaccaggaaacttggtaagactgagtgggttggaagccccagaacctcaaaccagagaggacggtaggagtttcacctacttccaaccaggccctgtcaagtgaccacacttcctacataggaatgtgacctatggtcacacagatcagaacagagttctccatgctaatgaggtatctagaggccctgacagtttagccaataaatttcccttcctggatattccttcctgcgaaaggtatttaatctctggtccaccctgaggaggtggtatgtatccattttccatgatgaacaatcaataaacagtttggaaccaaggactgtctctctcatcaagaatcactgtggggagcatggagaaagccttcacctacagagcccggtcatctaaatcttctgcagaagacccctctgcactcccagacagtgtgaaactaaggacaatctctgataaactaagccagagttcccaaccccccagtgccaggctcctcagtccatggaccaggtcatctggatgtccaggaatttgggaactcctagaatgacctccccacaggcccatgggccccctctgttcccaagtcctccatgcaatgatgtcaggatgcctgggagtcaggctacatcttaggctgagttttcctacccctgagcagtgtgtagagtgcttcctgtgagcccatcacctgacagcaggcatagggtaaatgcaatctagggctccacacttcatctgcccggctgaggtcccgcaccccagctgtagggaagaactcagaaccacaattgtaggcccatatgaaaaaaattccatttgaagtatatatacacacaattatgagtgttataggttttgtgattattttaatgccatataatattactgtcttatttaacattgataataaaagtatatgtgttagctgaacacagtgctgcacacctttaatccaagcactcggaagccagaggcaggcagatcgctatgagttcaaggccagtcttgtctaccaagtgaattgcaggacagccagggctatgtagagagaacttgtctcaaaaaaaaaaaaaaaagaagaaagaaaacattttttaaaaatgggagtgctggagaggtggctcagaggttaagagcactggcttctcttccagaggtcctgagttcaattcccagaaaccacatggtgtctaataactgcagggcagttgaatgtgagaggaagcctggtaaggttgagctaaggctagaagccccgggaccctgaagggatggtaggagcttcgcctgctcccagcaccaggtccctgtcctgtagccacagccctgtgtagagatttgtggccatgagtcacgtaggggcaacaccccaaacccctccacatgtagatgaggcattcctaacatctcagaccaagtcaataggaagcacctgctgtcagacgccaacccaccccaaaactgtatataagatcctatccaggaggaataaagatgtgagaattcctccattatctgagaacatgtgtcacaagcgctgtaacactgccaaggaagagaactgctcttccgaaacttttgccaccagaagctcactacgctcctctcgctggctagccagccttctgcaggctcagcccggctcagctcagctcagctcagtgcagccattgtagcatctcagagcaacagcagtgagagcagcagcagcagcagcagcagcagcagcagcagcagcagcagcagcgacagtgaggtggcagagagacttcccctccctgcttgtgccctttcccctctgcttgaaccctcccacctggctgggtcagagatctccatggatagcttccagtatacaggtccacacacaaccattcataatgggatccaatgtcctcttctggtgtgtctgcagacaatactcatatacataaaatcaatctctctctttttttaagtgtatgtgttttatagttaatttaaaatgcatgagtatcattacagaagtaaaagttaatccttagatacatgtacatcaaagtcagtcctcttagatgaaaattagaattgaggtaaaactaatccatagtgatcagaattaaacttggctgctatgaagacattagggtctgccagaaagggtcacaggaaataatggtaagagaaatgcttaccttgatggacataggagtccctcagaaactaatcgaattgtatacccgctatacaattctatttctatgtgaaatttaactcattagaaaaagccacgtggtcagcaaaagtgtcacataggcacaacacagataccacagtacctggaaactgtgagcagaaggtggttggagtctaatacaacttcacttctatattttgctgctatagtattcaaacagtgagggtctttgttgttgtttgtttgtttttttaggaaaaaaaaggtatttttgttctactttcctaggaacttcacacttctgacatcaataatttcagaaaacaaaagcaacggattgtcagaaggaatagaagagtgatgtccacccagggtctcctttgtttgggtttgttattgttattattgttgcctgtgcatttgaactaaaacctccactttcccaaacatcccaaatgctggctgtcaagagtagccaacgccagctcccctcaactcaagcatggcctggaacccaggccacctacccaacctgagggaaagaacctccctcagcagcctttttcaaatgacttccagacagaacactcacaccgttcctggctgtggatgatactgaaggactgccccagtgtcagaaattcccatgggactggcagtcagctgcactcacaccctcagaggtgcacttgccgagagtgtctcatgtacctgcacacacatctctagtgtggagatgagaatccagcataggcctattggtgctactactgaaaacaacttgccacttcctagggttgggcttacggtccatgactggcctcgttaacaagacgaagagtgctgaagcaagacatgacagctaaggagaacaagcatagagctgcagagggcactgcaatggatgggtattttattcttctgtcctgcctcctggaacttaagtccctagaagatgacctaagaaagactatattggagctaaagagatggatggctcagcagttaagagcactggctactctttcaaaagacctggcttcaatttccaggacccacgaaacagctccagtccagggaatgtgatgccctcttctggcctccatgggcactccaagcacatggtgcacatacatgcagacaaaacactcatgtgcataaaaatattagaataataagaaaggctgtacttgagggacatttccattgttaccacagaagttcccctgaccttatagagtacctgaaagcatgggaaggagtcccagaattctttcctgagcataaagccactgctgacgatactgtttcacaatggctatgtgccattgataaatatacttctcttcctgtaagggagaggaagaagaaaaagaaggaggaggaggaggaggaggaggaggaggaggaggaggaggaggaggaggaggagaaggagaaggagaaggagaaggagaaggagaaggagaaggagaaggagaaggagaaggagaaggagaaggagaaggagaaggagaaggagaaggagaaggagaaggagaaggagaaggagaaggagaaggagaaggagaaggagaaggagaagaagaagaagaagaagaagaagaagaagaagaagaagaagaagaagaagaagaagaagaagaagaaagaagttgtcatatgagtggtttctttcaaacctgaggagaaactatcttaagagtagccaacatcatactaaatcggttaaacccagaagtgtctcctctcaaacctgaaaaagaccgaggttctccgttaactttgctcctttttattcttttttaaaatttgtttttattttatgtgtatgagtgttttgtgtgcatgtatatgtgtaccacatgcatgcagtgtccttggatgccagaagagggcatcggatccccctgggactggacttaccaataggagctgccatgtgagtgctgggaattgaacctgggtgccctggaagagtagcaagtgctcttaaccactgagtcttctccccagccctctgccttccactcttatccaacaaaatgcttgaagtcttgcctagacacaagtcttgctcagacaagaaagaaagaaaatcagtataaatcattagagaagtcagactgtccctactgttatacaagtaccatatgctgaaaaccaagccattggaactctggaaaattatccccattatcaaatggcatgagcctacacttcaaagaactgaagagtccaccaaaaaataagaataagagatttgataaactctcccagcaaagacgcaagacataacaaccatccactttttataaactcatacaaacaaaccacaaagaaaccagggagtcccattcacaatcgtttgaaaaaaaaaatacaatcccgagaataaaattgacctctgcaataaaaactttaagacagtgaagaaagactcaaagaagtccctaaaagatggaatcccccatgtttatggactggcagaattaccattgtgaaaaatgccaatattttgtcaaaagctatcaatttgaaatagatcaaagaccttaatatgagacctacaacacaaacagttatggaaaaacacttccaagtaaagacatacacaaaaactttctgcaaaggacgctaaaagcataggagataaccacaggaattgcaagtggtattatatgaactaagaaaaagccttcgcacagcaagggaactactcacagagtcacacagcctttggagagggaaaagccttgtcagccgtgtatcagacaggcattaatatctaaatttaaggttaataactaatatctataacttaaaatttaaataccccaaaccaaaccatccagtcaataaatggactagggctggcaagatggctcagcaggtaacaaaaagccttacaatgtaagtttgatccttggggccaacatggtgggagagaaacaacttcttcatcaccctctgactgcaacatgcatgtggttgcacacacacagacatgcacacacacagacacacaacaaaattaatttaataaataatagcatgaatgagctggatagacaatccacgaagaaatgatgaattaacacttgaaaaagttatcagcttccttagtcatcagagaaatgtgcatcaaacctgatctgaggggctagggagacggagagatggacagtggcagctgcaggcactagttactattccagagatctaggttcaagtcctagcatggggactcacagctctataattccatttccaggtggcctaacccgttcctctgacctccagcgggagccaggcaagcacatgctgcacagttagatatgcagggaaagcaatcattcaagtaaaataaaagtaaatactttgaaaacatgtgtataaatacagctgttttgagattccttctcatcctagacaaacggcgtaagaaaataataaaataaatgacattaaatgctgccaaggatccgaaggaaagaggagcccttagtcattgctgatgggcctgctccatgacactctgcatggaggcttctcaaaaatctgaaaatgaacaaccaggtggctcagttgtgccactcctggatgcaaagaaagggcttcctgtcaacaaagcccaaagatgctggtacatccatgatcactgctgtgccgctcacaacagccaggaagtggagtcagaccagatacccatcagcagatgagtggcatgcagctgagaagaaaactgaagtcatgccatctgcaggaaatcggtatggtaaagtgaaaaagacagacgcaagaaagagaatgtcatgtttccctcatatgtggatacgtgtgtgtgcctgtgcatgcatgtgtgcccgtgcatacgagtgtgtgtacatgtgtgtgtacatgtgtgtgttcgtgtgtgtacatgagtgcgtttgtaggtcatgaaactacaaaaggatcatgagagggctagaaagaggtctttgggagggggagagagggtaatgggatacctataataagaaagcaaaaaaagggagtttctgaagaaaggaaaggaataagcctgagggaggcagaatgtgaggtgggaaggggagggacaacaacagggacaatgacagaggggacaagtgacagaggaagtgtaatgagctcaagaagatgctgcactgagtcctgttacttcctgtgctggtcgaaacaaaaaaggttttggaaacaaggtcttatgatgtaacctggctggcttagaactgattgtttaaaccaggctggttctgaactcacagagatcctcctgcctctgtctcccaagaactagtattaaaggcaaattttagaaccatcacactaggatctaaaacactccacacacacacacacacacacacacacacacacaaaatgtttttgaaagttggctggggagatggctgagtcagtaaagtactgggcaccagcatgaggacctgagttcaagccccccttccccatccctgccccccaaactcgtatacttttaagaagcagagcatggtggcgcttgattctaatcctagctctgaacaaacacctgggctcacaggggctcactggccaacaagcctatcctaattagtgagttccaggccaatgagagaccctgtctccaacaacaacaaaaagaagaggtgggtggcttgatgaatcaccccagaaaatggtaacaagtgacattttgcagaagcttataaaggcagatccataaggctatgagtttcccacccaggtccaatcaggggcaagcatttatcctgcctgccatacttcctgcctgcatgtgatcaagttctcccaatgaggctgggttaatcaagcgcgtttcctgaagggaaaacttgtgccttattatcctacatgaacaacagcctccagcatctcaggaagtatctgtcctgggccacagagcttccaggttagaggcagttttgttttatgaatctcttaggcacagtaattcaaatgtaactttagctctcacaagctcactaagcagcactcttctgaggctctggcttcggttcctgcctccaggtttctgcctttagttcctgccctgacttccctccattatgaactataaattgtcaattgaaacaaaccctttcctctccaagttggttttggtcatggtgttttatcacagcaataggaaccctagctaagacagggtgttaagggagggaagaatctattgcgatgaaaataagcgttttctcaatgtggtttataaagatgtgttgaatgcatgactcaaccaagattatcaccatcaaacattaatcagtgtcaaggcattacacctgccagagctatagctctccctaatcccaactccttctcctgccaagtcagctactctttttttttttttttttttttttttgggttttcgagacagggtttctctgtatagccctggctgtcctggaactcactttgtagaccaggctggcctcgaactcagagatccacctgcctctgcctcccgagtgctgggattaaaggcgtgcgccaccacgcccggcaggtcagctactctttaatgggttcttggtttagcagaaaccacagtaagctatgggtctgattgagacgccctgttcattactgaggcattccctggtttgcttccccctggatgcagatctaatttctgagctgcctgtctctctggaacctcctgtgtcagcatccagcaccccgcccacaccccatccgctgatctctggtccacaggagcctctgagcttctcgcatggcctccatccctgagggatggattctccattccactgtttccattctcccctgatcactggacgggatgggagagacagagagccagtctcctgttacctgagcctagctccattccacaatactgtgagtaacagctcttagccagcatgtttgagaggaacactacactgccacccacaaccgcagcagagtcatttcatttatcagggtctctccccttgtccgtgtgaaaacagtagtatgtactcacaagccagaagctgagttaatgcagtcagtgcttacttagatcccgtgagctggtactatcataacacacatgtgtatgttaccagtcatgcatctcctcacttagctctcactagaacctcccaaggtgaatactgctttctttaaaaaactgattaatctgcccattctgagcctttgtctctcctaccccattctgtctgttgaatcgctagccctaagtatactaggaggtggggtctttcagcaggtaactaatccctcaatagaggactagtgcctttattattgagaacacagaagtcagcccttattttactgagcgggtatgttgcctaactggtcagagaagcatctttgcagagcttcaatggggtgacctgactagacaaagtgctgaaagtggctattgagtgctcagccctacccaacccccaagctcagggaacagcagggaagaaggggtgggaagaatgaaaaagctggagaagggagaaggctgtgaaaagctgtcttctgaaagcaaggccactaccctcacggacttgctgaagctgtgtttacctacacacaacctgcacatgacaagccaatcaaaactcccatcgcaaggctccacccctttctgaggcgctattgtcaattgatggctgctagggggatttctcttcaggggtgtgatcactggtagggttgccctacacccatgcgtctgcaggcatgggccatagaagccaaataagcccttccctccccaggttgctttcagtcatggtgtttcatcacagcaatagaacacaaactaatacatatacatatatgaaattctcaaagaataaattaaatgtattttagagaccacagagaactgccttctctcttttaccatcttaggaccatggagacattatatatagtatgtatatctatatagtgtatatatacatatatgcaaattatgtatatatgtgtgtaatatatacatatgtgtgtgtatatatatcttgtgcccaccgtcagacagacaatccactagtgtctcagacttacataacagtgagaaatgcctggtatttataaactatccatgggatgacatttggggacttaaggtattcaatgaacctaaatgaccaagactgtgacagaggaagtaaaaagcaaggtttaagttagggtctgtttgtccagcagacccaatctttttcttgtgtcaggtttctgccaaggccaattatctccaaggtatgcagtagacaaggcttccttgtggggaaaagctagggaaaagaggcctccagctgaggcaattactaactcttcgaggcatacctaggaagtcatgtagtgaaacaaaatgaatattaagccagacctggagtacacatccctgctttgtaactcataagctgtgtgcagacacagccaacgttctgtgacttcatcccagaaagaggatgctaatgccatggttataatgaggatgctgtgctgccagcccacagtgagagagaactggcagagtgggggaaatgtgagaagatgccagaggtcacagaagtcatcagcgtttatgagtgccctttaaagatggcatagtggagacacactgtcactgcaaccaagggaaataggctcagatcagagcagctaagcatgctgggtaagtctggtgtcactgaaatgcagtcagataagactctttcagatgccagtcataggaaactaattcaaacagtgcaggggaaagtaggggctcgggacccccaagaccaagttctcggcacaaaggagatttgtcccaggggaacagaaggcaggaatatgagacagcgacaggagatagaggaagagggagaaggagaagggaacaaaaaggggcaagggaggggggaggagcatttgtaccggagggggacaaaggacggcctggaggaacaaggactgccactggatagaagggagacagactgtgatccataggcaaatgacagcttataaaggtaaagagggaagccctgtgttaggatgaggtgtttaattttaattgggcatgctaattagatgaatcaaaggtggcttttgattgctggaacttggtagtttgcctcagaaagagggatcggtcatataagaaaatagaccttggggggctagctttaggaatgtaatctaatggtttctagcaaggcagagagaacaagggagaagggcaaggcctgcatgagccatgtttacctttctgggatggctagggtcctgtcaaacagtcatttgcattaagagaatttcttcagacccggagtctggactctagtgagagcgcacatggagtctcagatctgctgtgctcccagctgtcttctccgtgctgttgtcttctgtagatagcagccctccctacctcctgcgtatcaggattccaccagaccccactatagaaccacagagcaagagacttggtaacgaacactccaggagtcacttttttgcgaccccagcttcatgtgtccatctcagagccatcgtaaaagctggagggaacagctatcctaactggctagcccttgggggtggagtgaggccggcagacccttgcgaactgtatcggatgtgttgggggaggtgaacctggaaaacacaaggtgctgttacccgaaataaataaatgaatgctgaaccagcagcaaaggatagccgtgggttcaagaggcaccctgggtgtgaatgtatcctgcatataatgaggtaaagctggtgagagagttgcatagatttcagcaaagcaaatctaagccactgagaagtcagggcagtgggaagcaacatgaacaccccagctgagacaaacatgctggagacagaacagcgacagacagcaggagggaatcatcctggggccatgaccaaggctgccttgttaagggagagaagtctgggactcgggatggaaaggtggtctgatatcattgagaacatatccaaaaggcctgtgctgatggagctggtgcctctggctttcggttgagtggacagcttgtccctcttcaagggctaggcccagcaggctgaggaaaccatagcaaccacaagttaagaaagacagatgaaaagcttgtaaacacagcttccagccatgtggcatagctttggactcctaggagacagccacataaaaaaagcagtctagctcgtggagaccaggcagaggggactatttctgggcaccaccgtgggtcaactccgagcctgcgaagcagccaggcaaacaggcagcacaaacacacgggtctcgggtgggttatccatctagatagtcacacatgctgaatggccaagcttgctccctccagtagctgctaagctactgtgctattaagccacacatacaccctctgagagccacctcctcgaaaacttctgccccacccttcagcactgtgaagaaagttaccatgggcacagtgtggcagcaatggagaaacctgctgaccagctctgtgtagctccatcataaataaccagctgcctcgtgcaatttcctgagctgcacaactggcagtgacaacgtgcgttttcatccatcatccgcagtgatggcggggcctcagcggggtgctgataactccatttttcaaggccatagccaaacccgttttttttttttcgctgctggagagttaactgtttctctgcgggtctttatatgacagtccccactgaaaatagccattgaatagaatataatatctatttttctcactctgattttccaaaggcagagtgtaatgcacgtgtgcatgcacacacacacacacacacacacacacacacacacacacacacactcagagagaggggggggagggagaggaagagggagggagggagggagggagggaggggaagagagagagagagagagagagagagagcaggaaattcttttcacctgataaatacttgaaattttaggtgcacagaacccaaatagtaactatggcaacacaagccactccagtaagacaaggattattcccagcacaatagcctggcttgtgctccaaaagcaaaggtaatattggctgaaagcaatttcagaattgggaaaatctaccagcatttgaagctttgtgtttaggattccacttccactgggtggcaagatgaattcacgactggagctctagcgtgcctcccagagaaaatgagccagccgcctcaccctcttcttagtcattccccagcctcaaagctgtccaaacctcaggattagagggctcggcactcagatacagcttgggaaaatcataaggccaagcaccctgacagcgctcttggggatcatgcctctgggagccccaggacaaaggaatgtgctggagaccttgcccatggttgacctaaccgtgcttgtttctcagcttaggaaactgagacccacagagattaggaatgcttggttatagtcacatgaacttgtgcttaaagccactggctgcggaagaaaacaaaacagtatttgtcatcacatcaaagctcagtgtgaggctggctccgtcggtcaaagtgcgcgcgcggagtaagcggacagcctgagtttgatccccagaacccgaggaagaaggagggatagactctcaaaagttcttttctaacttccacgtgtgtgcgggggcctgcacactcccatgcccacacatccacaggagattcttaaatactgcgtgtggaactgaacaccctttcggtgcactttggaatctgtctggctttctggtgccagggtggaacccagggccttgtgcgtgctaagcatgtatccttccgtgaagctacgtcccagtccttctgtgaacttttcatactggattacctcacctacctattggccgcgttctatggacttagattttactgatgcgtcatttgcaacggcacatacccattcatcatttgctcaccaagctaagcagatcagccaaagagcgtctcatttcattatccagtatcgtatttactaagttaattaccagttttatgagctaggtctttaaagattggaatgatgtgtagctcactggaggcagatattctaattttcacttgataactgtaacgggaatctctgtgacaaataacgtcagctgcttgccttaccaggcccataaactgattcttgaacattctcttccaaatgcccaatctagagacaatgaaatctttatcaatggataacttttatggataaaattatttacccttggggtgctggaactcattggttaagagcactgcctgatgttccagaagacccgggttcaactcccagcatccacatggtggctcacaaccacctgtaactccagttccaggggatcctactcctacttctggcttccatgggtaccaagcactcaggcagttcccaacatccatgcagacaaagcatccatgtacatcaattaattcttaaagagtatttactattgttcctcataccacaaaacaaacacacattaaggagttaatgaagaaaccaagcagatgtgttagcaggccccaaggacaagttaaaaaggtatagcacgggctagtgaagaggctcagagagtaaaggagcttgccagcaagcctgattacctgaatttgattcccagaacccacatcatggagagagagatctgactccagcaagttgtcccttgacctccatacacacacacacacacacacacacacacacacacacactaaatggaattttaaaaggtaggaataaggaataaaagaatgttcaaaggaaactgggtaaaaaactggctattttccctggatgggaaaagatagccttccactaggcagaattcacttgcgcatctacaagcaagagtacttttgttttatttttgagtcaaggtctcaagtatctcaggttagtgtcaaactctccttctgcagccatggataactttggacatcctggttcttctgtccccgactgtagagtgctgaggttacaggcatgtgccgccatccctagcttgtgtgctgctggggatgtcaccccaggctccgtgcatgctagccaagctctgagctacagcacagccaacaagattattcagtatcgctgctgtttgacagagttgtaaaataactcccactaacaatatcaagtctttctttgaagcacaaatataccttacaattttatggcactcatttttcatataaaatggtatttatttaaaaattaattagacctttctcctcgttgggtgtctgaaggcaagatgggtgaccagcagctctactggagtcacccacggaagttcggccagggttcccgctcttgccgtgtctgctccaaccgtcacggtttgatccgcaaataccggctgaacgtgtgccgccagtgcttccggcagtacacgaaggacacaggcttcattaagttggactaagcgaccttgaatggattcgactgactgccaagtggaaccgatcatgctagtctttgtgcacaaagaataaaaatatgaagaacttttaaaaaaataaaataaaataaaaaataattagatttgtatttaattactttttagttcagctcacacctcaccagatgcacaattgtgtgcatgcacacacacacatacacacacacatacagagagagagagagagagagagcacttcagtaagccacaaggctctttatgtgtacttcccatttaataaaacaaaatattgaaacaatgtgtgcacatgaaggctgacattaattgaattaatcacttgtactgcctgatcaaagacatgcaaatgaagggggtttgcatttgccttggtttgattttatcacatgtttggcaaaggagaatgggctgtctgcagccttcatttcaagggtcccccacccatggattcacccacaggggatgaaaaatatttaagaaaaaaaaatacccttacatctgcactgaatagacagacacaggctttttctgtgtcactggtccccaaacacagcagagcaactgtttacaaaacatttgtattgtgttaggatttatatggatctagatttagagtcacgtgtaagtgccatgccattcactatgagtggtgtggggagccacaggcttggtgggggaaggggttactagactcattccccctgggacagacaacagggtgactgtgtgacagtcccatgctgctgctgcaggtctctgcggcaggcacagcaatgttcagaaagcctatacagtaggtgctggaaagagtgcttgctgctcttgcagaggaccagggcttggttccaaacacccatgtggcagctcacagtcagctgttactccagttccagggaatctgacaccctcttctgaccgccgcatgtccctgtgttggggtctatacatcaccaccagcagcaacatagcggtagccattttgttccatgcctgccagatatttcatattgttgctgtaacatgcctgccagtcactgacacagaaaaataacttgactcagagcagggtcatgctgaccacataccctgttatgttctgtatgttctgaggtttgctaatcttaggaaatcccacaaagcttcatgtgggccccatcaagttaaaggtcaatatgaattgtgtctaaaacggcttgagtcagagctggcctgcccttcctgcacctacctgtgtatgagcttatttcgatttttgcagttttagcctttataagctgacagagaaagatgtttatcgctgtggctcggcccctgaattctgagctactgtcctgatcgatcagtattaggatgtgtgttcaataaaccatccctgtctgactgagatcagtgtttgtgtggtttgcggggtgactcatggactccaacaccctgtgtgcaaatatgtatttaaccttaatgcaaatatgctttaacctttaataaatggtgaaatgctacatatagcaaagaattgtcttaaaataaattttttcatgatttataaatgtttgattcttttacccattttgtgtgtgtatgcgtatatctatatctatatctatatctatatctatatctatctccagggtcacataaaaattccactggcagaacgggctatgagcagagactgaaggaaaggatattcaaaagcaccatctcgtcccatatagaaaggctgttatcaaaggccaacacagatgctggtgagggtgcagagcaaggggaagtcatgtgggactgacagagatgcaagttagtaagccatgagggtaaagagtgtagagattaaaaaaagaaagaaagaagaaaaaaaaaccctaataagaggagctgccagggagctgggtattagagtgagctaccatatggaaggcctgggctcagttctcagtaaaatggaaccctggtgtcaaccagcagtacttccaaagggagggaaattggaacgtcaaagagatatttatgcttccacttttatttattgtaatcttattcgcaaaaaccaggagagggagtcagcctgggtgtccatcagcagatgaatgggcaagaaaaatgaaacaggctgcacaccagaatcttactcagacctaagaaaccaacatctgccattaacacgatgagcctggggaacacgatggttaagttcagcaagccaggcacagaagcacaaatgtctcactcagctgtgaaagctaagaagaagttggtctcagaagtctgagaggagaaccaagatcgggcccagatgcagctcagtagtaaggggcctgcttcgactcccgaggctcaggttcaatccccgggactaactaataagggaaaggaaacaggaaggttgcacagggattaaaccggggcctggaagagaaattgagaaacattaaataatgggaatcaaaagaaagttagaggtagaaggcagacaccctagtgttctagaacgcagtagaacgaatgtagttaaccccagttctgtgtgtgagagttctcttgccttcttctgatggaagttgtacctgagagaaataggacatactccctacaaccagaaccaaaggaagatctttttcactgaaggtgcagagacccaaggaagctgaaaaaaaaaggagcctggctcacgtctcacctcaccttggctcatgtccctctgggcacgactcatcccctcagccaacctcatggattccaactcctgttttccactgctcttcagacctaagcctaaagcacacaagcttagctgtctcatgagtcttcactgctcaaggctcttgtggtcgatgacacttacattaagtaagtctgtatgctctacttcttggtacagtctgtctttttagagggcctcagccataagcctagtgatggataggaaaggagttctcttctcattcccacacacttagcaccttcacatcacacacacacacacacacacacacacacacacacacacacacatctattcatattaaaaaatggatcagcatcttagtcctcttccacctcagaaaatctgacaagaggatggggctggagagatggctcaggggttaagaggatgaactaggctttcgggctttcttccagtggacacaagttcaattcccagcactcacgtagcagctcacaactaactgtctggaatgccaattccaggggatctggtaccttcacagtcatacatgcaggcacaacaccaatgcacataaaataaaagtaaatctctaaaacaacaagaacaacgaagacacaggaaggatcagctgggcgaggccgttcccacttgttatcctagcactggaagcagaggaccaggaactcaaggccttggctacatctgagtttaagcttaccctgagctacatgagaccctgactcaagaagaaataaataataaataaataaataaataaataaataaataaatgctgtaaaaataaaaataaaaaaataagactgggtagtggcggtgcatgcctttaatctcagtacttgggagacagatctctgtgagtttgaggccagcctggtctacagagcaagtttcaagacagccagggccacacagagaaaccttggcttgaaaagacaaacaaggagctggtgagatggttcagtgggtaagagcaccgactgctcttccaaaggtactgagtcaaatcccagcaaccacatggtgactcacaaccacccataatgagatctgataccctcttctggtgtgtctgaagatagctacagtgaacttatactaataaataaatctttggccggagcaagtggaattgactagagcaagcagaggtcctaagttcaattcccatctgtacaactaaagtgtgtactcatatacataaaataaataaataaataaataaataaataaataaaagaaaaaacaaaatgatgataataatataaaaattttgaaaattccaaattattgtcttcaaatcttttacttcttagttttccgcccctcacggcacaggtattgccttctggaggttcactgttgtgtattgataattctttgctcctcatgcctttcaatgcagacccttctacacaaggtccagatgtcactggtgggaaactggcaaggtgactcagcacttgctgctcggccagaggactgtagcttggttctcagcgtaggcgactcacaaggacctgtaactccagctccaggggagctgacgccctcttctacccaccatgggcatctgcacacattcaattatttttttcaatcagaatttctctggttatgaactctctcagattttatctattaatactctcatttgctcctccttttgaaaaatgaataatcccaggatttatttttcctctgtacatttaagatttttaattgtttttattattgctgacacaaagacaatgggggtttgtcacccttctttaaaagtcttctgtcttcccctgtccctctgttttgcttgtgatatgtgcaggtgtagatttcgttttacttctcttaggtgagatttcctgggcttcccgaatacatgtgtagaaaagtgttttcattaatattgaaaacagctggcatttctgcaaatgttacacccttcattctgccttctacatctcccaaactcttttatgctttctaatactttaattttctcagaatttccccaaaattaccaattcttccctcagctacattgaattaactgttgactctgtatttcattcctggagattcttttttaagaatctaacttgtcattttcaaagtctttttactcttaactttatctcttatattctgtgactggagtcgccaatttgccatctctgtgagtcttatcctacggccccaaaggtcctgttgtcctgatttcttatgtactagcattccttttcatcatgagctaacattccttaaacctctacatgacgaacttctataagcctggaggagacaagtgaattggggtctgttgagtacctgtggattaaggccccacctaacagcaccttgtattaattcaggtcttgagtcatcaagaggtttgacccgtagttacagtagttctaattcttaaaaatgtctttgtgggatcctccatctaggctaactgtttaagataggcagttgttttcttctttcaggagacaggattcacccttacagtaaatcatcttttccccaaagcatggccatttgaaataagttatattatatgcttcacttgaacagggtccaagttttggtctactgtccccccatgactgaagacaagaaaaatcaaatctcaaagcccagtaagttccaaaagtgtctaagaggcaaaagtcagctttgaacaccatctttctcagttttatactttggatgactccttaatttgcttgctcaggtctatctgtctgtctgtctgtctgcctgtctgtctatctatctatatatctaatctactttggtttttctagacagggtttctctgtgtagccctggctgtcctaggacgcactctgtagaccaggctggcctcaaactcagagatctccctctgcctcccaaatgctgggatcaaaggcattaaccaccactgcccagctcacatatattttttaagacaggtgggttgcttgttttttgtttttgaaagagagggggtccggcatcttcctctgcaggcagagtcttctcttctgaggcacagcctctatgaaatctggagctctcattatttcagctgggctggcagctatcaagtcccagcaatcctcctgcccctacccacgctcaagcgctagggttacaggcttgttacatgggtgttagggtccaaaatgggacctcgtgcttgagcagcaagtgtcctttaactgctgagccatctttccagctcctaagcacggctgttaaatgtgagccagcatgtttagttgcttgcagcaggaagatcagtgaaggaacctatgctggcatgctgccagaacacagattcccacagcagcgtctaccaggtgaataataaagggattggcatggttttattatgcgcaacaggacaaagggagggcggtgagactggaactctccctctaagctgggagctcactggaacagctcagcggggactatgcagggaggagcactgccagccggtctggtctgcctttgaactttttattcagtaaataatgaagaaacttcaaaattaggacaatgacttgtagattttcacattaacattttagaattctaccatgattctttttcttttcccatttgtcacgtgacgtgtgtgtggtgtgtatgactgtatatgggaatctctgcatgtgtctgtgcatgttctctgatacacatgtgaaagctcaaggttgaagtcaggactcgtcctccatcactcttcctccttattcattgaggcaggatctctcagtcaaacccagaactcatgacacagatggtcttgtgaaacagttgctctgggaagtccctgtctctgcctttggaagctgaattataggtggatatcatgaccacccagtgtttatgtgagtttgggggatctaaaccccaatccgcatgtttttacagaaaatgttttaacccctgagccacctctccatcctaagtttcccctttaaatactgtttctcaggatgtggtccaagctttgtctacatctaaatcctctaggtcacctctctaagtcacagcccccaccaaactggtatccccagagagagaaagagggagaagaaaaatttccagaatgtagaaattttaattttaaccagcttactcacaaactttatgcacaataacttagaacttatgattcagagtgaagctttccaaacagttgagaccattagtgggttgggggtttttatgaattagaataaaatcaaaactctaaaggataaggaaaactgcatacagccttgttagggtaggaaagtgtatatgtgtatgtacatgtgcaagtgtgtgtgcatttgtgtacatgtgtgtgcatgtgctcctgtgtgtgtgtgcgcgcatgtttttgcatgtgtgtgtgtgtgcttgtgcacaagattctaagctgtgttttctgtactgagttttaaaaagttagacaggccctgccttagaggatgtaccgctattattttaatcagatcttacttataaatttaaaagtagagggggaaggaaggcagtgtaattgccccctgactgaccctgtctatgtatgtatgagaacaggtttcttctggcacttcctgactccaagtaaactgagcaagtgaagtttgcatctgaacgtagagagctggggacactctctgattgccacctctccagggagctccccttatttttgtcaggacagcaaaacacccgagttccagctctcattacatctcagcagatttgcaccaaaggaaaagtaggaccacaaagttctggcaaagtactgtgtgcaagattctgtcacactgagttttgttcctacaagtaggctgtgggttgccgctggagcacttttgctgtctcttccttccttgctctgacgcttgctgcgaccaaatgtctctacagtcttttctcaaaaaataagcaaaaagaaggaaagaggaacagatctactcagtcaagcatcacttccaaatgtgctcacaagcacacattatacacatggaaatatacacatagacacacgtttgtgcatagacacacatgtactcatagacacacatgtactcatagacacacatgcacagacacatacatatgcacacatacatgtgcatgcaaacactggctcttttcaatacgttgcacattttaaccattcatgtacttcttgcatttctcattttcacaaacttctgatatgattctttatcttcttcagattgtatttgtgtgtgtgtgtgtgtgtgtgtgtgtgtgtgtgtgtatgtgtgtgtatgtgtgtgtgtgtgtatgtgtgtgtgtgtgcgtatgtgtgtgtgtgcatatgtgtgtgtgtgtatgtatgtgtgtgtatgtgtgtgtatgtgtgtgtgtgtgtataatgtgtttgagtgtgcttgtatcatgtcatgtgcatagatgtctgtgatggtttgtatatgcttggcccaggaagtggcactaataggaggtatggccctgttggaataggtgtgtcaccgtgggtatgggcttaagaccctcaccctagcttcctggaagccagtattctgctagcagccttcagatgaagatgtagactctcagctcctcctgactgccatgcctgactggacgctgccatgcttcacactataatgataatggactgaacctctgaacctgtaagccagtcccaattaaatattgtcctttgtaagacttgctttggtcatcgtatctgttcacagcagtaaaaccctaactaagacacccttttttttttcactttgactattaactaggacaatgtcagaggacaactttgggaagtgttttcttttcttccaccttaacattcgagtctctaggatcaaacagtcatcaggcttatgcagtaaatgactaagttgtctcgtcagcctgtttacctctttcccataacctgagtaacataaatatggattcaaagggaataccttatcccagccctaaaattggaaaagtagtgtatcacttggcaaaaaaagaaggcatctgtggaaatgaatgtgaggggagaggggtgatcgtgctcaggttccattctgttcctgaccgagcctctgaaattgaatgaagtctgttctcattgctcaaaaacattcacacagagaaagatttgggagtttttcttctatagacctgtggaatcaaaccgagtcagagaacgttagcagatggagctttaggggagaaagcacttatccaaagcagcccactcgtcccacttagatttctaactgaccaggtacctctgagcacgaccaacttctttgttagcatctcgaacttgggagacaattgtggcagtctgtgtgagcgtgagatttccccctccaaagcctcttacaatccagatggctatgccttgtccccagagtggctgatctgtaggcaaagcctgggagtctgcatttttagcaagttcccagaaggaactggtgctgttgatccagagcactctctgagagccactgaataaataagtcccgtctgtgccccaaaccctacttaggggagactcatcttctctgctccccaggaagcctcctctactctctgccctcctcaatcttctcatccagtaagaacacccctctcattgattcccagtggttccaccaaaataaaacatcttatttttcctcacttcacaaagactacgctttgaaacactttctatcgaacaaaatgcatttattaactgataatgaattcactttctcatgttttattaatcaaagactgccaatcagagcctccaagccagcacggggtaactggtgtttctatactgagttgatctaattctagccccaagcaaagaaacctgatgttttggtttaattagcccgagcatgtcatctctggtaaataaaagctgctgggattagtcctttttgaagatggaaatagcatctaggtcccctcccctccccatcactgctctctgagacccttgggagcctaaggtgttcaaattgggcccacctgatatatatcactcctgtgatgatgagtcattcattgtctttgtcatttcttctactgttgtctggaaagagcacaagggggccatatctgaccttggcttttaaactgtgtcatgtctcactttgggctttagaattagaaaaggaaaaattacaaaggcaaaaccaaaactaattatgcaaattatatgtttgattatacaacatttttatccagggaagaacaactctaaagtctctctgctgttaaacagcccatcgctgtagataggagagtaaagcgtcagtcaacaagaactgcagaccttccaggactgctgcagacttgaaaagaaccatttgcctggggaggttgaccaggatgtaattccagttgacaactttgcctggcacgaaagatggtaaaggagaatggctgaaatgactgcagcttcagatgacactaagatcttaatgaatccaacctgccttcctcaaagggatggctttttctacagttctgtttaaaactcctgtgtccaattgtactggctagttttgtgtcaacttgacacaggctggagttatcacagagaaaggagctacagttggggaaatgcctccacaagatccagctgcaaggcattttctcaattagtgatcaaggggggaggttccattgtgggtggtgccatctctgggctggtggtcttggttctataagagagcagcctaagcaagccaggggaagcaagccagtaaggaacacccctccatggcctctgcatcagctcctgcttcctgacctgcttgagttccagtcctgacttcctttggggatgaacagcaatgtggaagtgtaagtcaaataaaccctttccttcccaacttgcttcttggtcatgttgttttgtccaggaatagaaaccctgactaagacaccgtttgaataaagaattgaataaagaaatctctgccataggttcagtcatttcacttgtccccagttggtggcactgtttggagaggtcctataaaggaaggtgcagcctttctggaggaactgtgtcactaggggttggctttcagaatttaaaaactggtgtcacttccggttctgcagggagcctgcacatttggaaagggttgaagtggaacacagcatcagacccaggacaaaaggttggtggtctcccaccctttaactttttcttactagtctgtgctaaaaactcaactcatgattacttgtggttaattaagcgctaatatctggcagataacacatgatgtttagcaggggggaaataagtaaaagaatttattgccagtcctcctttttctgcagcctctcactagccagggagtttgataactctttttgaaccagagagaaaaagggaaagaaagatgtcactctcacagacacgtacataccaggtgaagtggaaaatggctgcacccatacgtttggatagatggatagatggatggatggatggatgatggaaatctcccccctcccccaagccaccagttttatttcttttttctggcctttttatagacaaaagttcttagaaaattatctcatagataaaatgttacaaaaggggggttacaaaaggatgttgatattaagttcaaagcagtgattcattctataagttcattataaattcaaagcaacagtttcacgtggccttgtcttatcatcatgcacaactggggcttcatcctgtgtgggactgtgatgggcagcctattttggttgaatggggcttgctccggtgacccaatagagaaatctacaagggacagaaaggcgagccacgttcccataatcaggtgcctgtccataattctgtgactatcagtcatgcagataatctcccaagctctggcattctggctagattccaaccccacagttacctgactatagccagctatgctcctccccacagttacctgataacagcaagatagcccagcccactataagaggggctgcttggcccctccttgctctcttaagctctcacctttcttactctctagccctcctctctctctctctctctctctctctctctctctctctctctctctctctctctctctctctccttttcccccttctctccatatggccatggttggcctctctctttttaccttctctctttctctctgcctttctacaataaagctctaaaaccatggactgtctctgctcatcaaggcctgctgtgcttgggtgatggaataggctttctcctaacgagccatgtctaatctcccaccagaaggtcatcctatgctccagcctcggacctgaccaaggactctcgactgcccaggtgggaaccattcaacaccacctctcccctgctctctcctcccttcatccccggggccaagtgccacccggggcctctattctgttctcagctcctccgctgtatccagctgggggcggcctggtacctggggctgccccttgtcaaccacccgctgtgtggggtcagtggcataacacagccagatacccacctggggcctcgtggaaagtgtgaacagtcctcccacatctgcctgcccagaacaccagaactctggcgggactcgggttctctcccactcccctctttcccccacacccacagctccacaatcctggggcctgaatgcttttccttgaacacaaatttgtctcaagcctatttctctttttagtgtaattatgaaagctcattgtattttttattatgtagccttactcactattatgaggagtggacacattttatttttattctaattttactacatcttcctagcaaaacaactaaaactatatcttaaaactttcttcctgggctggagagatgtctcagtggttaagagcactgactgttctttcgagggtcctgagttcaaatcccagcaaccacatggtagctcacaaccatcagtaatgaaatctgacaccctcttcccgtgtgtctgaagacaatttacagtatacttacataaaacaatgaataaatctttttttttaaattcctaagatcaaattgggaattctataaaatcagtaattcatctaaatagcattcattcatggaagttcatctttatgttgaactgcagaaaatctactcagtagggtaggctaatacccagggattgttatattaatttaataatgacaggaaaggcatatcagctgcaagaagcaatcctgagatgaagtctctttgggaccttgcctctcagaactcatccatcttagtccatgcaaaaaggtaggccacctctagaaaggccacctgcaggaaggccacctgttagccttagcctctcctggatggttcctgacacagttccctctctgccccatgcctgagcctggaggcatgatagctcagcttcctgctcctgcagtcaggtctataacttactctcacgcttccctgctatgatgaactcttatccctcaggaattataggccaaaacctcattctttcagcagttgtttgtggtcataatattttatcacagcagcaacaacaacagaaaatagctaacaccactcctgtcttccagaagctgagatgtaatgacctgcttgcttctagccacactttattctaaactcccctagcagtatagtgtattgcaattgaaatttcaaaatcgctctccccactccatgacagagtcctgaaacttgacttttacacagtagtttcttcatatgacgaccttgcacgtactagacatcttaaaaatgttaaatgccaatggcggccagctgttatctctcattaatctcctcatgtgacttctggccctacactagtgagaagaaccctccgatactattcctgactctgtttcaaatacttcaccaaagaaaccccaggaaattcttttgactattgatgactctgagggtaaggaatgcaaaaagcaagacttgggaggttgttttacttattttaaggacttattagatctgactaattatgcagcttatcaacgtagaagatcttctgggtgccatgggatgagctgccccatcatttgtgcctaattaaataatgtaagttgaagctaagaaggccttcctgtaatcaggttcctgttcagtcctgttgctatggcaatttagagctccagccaagatgacagcaactatattacacttcactgcatgttctgtccccttcagtgccctcagagccaggctgggcttcatactgtacacatagacaaatacattatgtctgcaactcactttttttttccttccatatgaaaactaatcaaattgatgtttttccagcatcttcacatccttgtagcagagactaaaaaattatcttacaggaccatccatgcacctctaatcctttctcttcctgagaagaaagattatgaccaagagattagaaaagaagccagaagttgtggctcacacttttaatctcagtaccctagagatagagacaggcagatctctgagtttgagcctagcctggttcctagcgagttccaggacagctggagctacacagagaaatcttgtcttggaaaacaaaacaggagcagagaaagagagagagattagaagggggatatgttcacatcgacctggaaagtggaaggtactgtggcagtgacttagatattttcatcccctcccctttttggtctttttttttttaatttttatgacattttatgacataaattatgtataatgctaaatttgccattttagggctgaggacatagctcagttatagagtgctggcctagactacagagaaagaaagggaggggatagaagagggaggagaggagggagagggagggggagcggtgagagagaagctgtgaagccatttttaggcattcacttcactgccgtgatatacacttccataacatgtaaaggacccaagaatcccctcaagaacccccatggtcccaatgaaagcaccaactgccggcctcctctgtcctccccccatccatgcccggctcctccttccctcccccgtccatgttaactctcatgttcctttcagtcttggtgtattgctgctgttgatgtctcatgtaagcgaaaccacactgaaacccttttgtgtatgcttcatttcgttttatatcctcatggttgagttatgtagtagactgtaccaatgtgttattcttccttcaggctggaaacactccattttatgtatatcacccttcttgtagattcgcatgtatgtgaccaaaggaacaactccatgtttcctaaaaggcctagagaacatatacccggtgcctctcctctttcccttgatgttagtcattttggtgagttactggaagcttgtttcaagctaacaagactgtctgcacccaacagcaaagagcccccacgttgttagctctatctgtgcacccaggggttctgtggtgacctgtagtgattgatccttcagaagatctagaatcaccttggagagaaatctctgggcatgtctatagggagtttgtaaagtgggttagttgtggtgggagaatccaccttaaatgagggcgacgccattccaggtgctagggaggcaggactgcatgggaggaggaagtgggctgagtgttagcatccacccccctttgcgtcctgacttcaaatgtgaccaactctctcttaagtgcctgctgccatgacctctccaccatggcagactataccccggaactgtaagccacggcaaacccttccctccttccttaatctgcttttgataggtattttgtcagagaaatgagaagtaactaataatgctcccaacccaggctttatgccaaaaacatgaagtgataatgtaaggtctttagatttaaaaaaaataaaataaaaataaaaggcttcactggaaaaaaagcccacattgctgcaacggccatcttccagtaactcaccaaaatgaccaacatcaagggaaagaggagaggcactgggtatatgttctctaggccttttaggaaacatggagttgttcctttggccatatacatgcgaatctacaagaagggtgatattgtagacatcaagggaatgggcactgttcaaaaaggaacgccctgtagtgttaccacagcaaaaccggacgtttctaaagtcacccagcatgtcatgggcatcattgtaaaccagaaagttaagggcaagattccgggcaagaggatcaatgtgtggattgagcacatcaagcactcgaagagcagagatggcttcctgaagcaggtgaaggagaatgatcagaagaaaaacgaagctaaagagaaggggacctgggttcagccaaagcgccagcctgcgccacccagagatgcacactgtgtgagggctacagaaaggtgcctgagctgctggggcagatcccataggcattcatggcctaatggacaaaaaacgaaataaaggaccctggctgcaaagtgtcttccaaaaacaaggagcccaaaagaacagtgcccccttcaactaaaccaggaataaactggaaaggctaccaatgaaaactataattgctaccccctttagaatttacatattacatcaatcaacttaaaaaaacaaaccaagatctataaaaaagaactcttggaaacttaaaagttagttgactgcttagaagcaattaaaaggcaaaatgatggggaaggttaggtgtaaatatagataaatataaataaatatctatataaacatagataaagaagccagggatcaattcagttcattcgggaaagagagagggaaatcaccaaagaaataacgttagaaagtttgctgaaactgaagggcgcaagggtctgattgaaagtactatcactgctgtgatggtttgtatatccttggaccagggagtggcaccatctgtggccttgttggaataggtgtgacctggttggaatgggtgtgtcactgtgggtgtgggtataagatcctcaccctagttgcctggaagtcagtcttccactagcagcctttggatgaagacatagaactctcagctcctcctgtgccatgcctgcctggatactgccatgctctcaccttgatgataatggactgaacctctgaacctgtaaaccagccccaattaaatgttgttttttataagacttgccttggtcatggtgtctgttcacagcagtaaaaccctaactaagacaactgccaagttcagcacactaaggccatggagaagagcctggaaatatccctaaagatacatctgatacaattgaatgaaattaagaactatgttgggctcctagaaaatgatcttggaaaccaagaacacactgggacaatatcttcacggaaacataatttgaatagatttttatgcagctgaactgaaaaatccagatggatagaaacgtcaatgaatgtttctgtcttgtacgcttcttaaacaggctggatggcatgttcaccacagggcccaggaaatgcagggtccaacataaaagcaaagcaaaagtaagtctccaaattacaagaaggtgaaagggctagagaaaatctcagtgtttataggacgagaaagacctcacagaagaaaggttgagaacacatgctatacaactgtatacaaaattactgacatatccttatacccatagataggtgtagttctcactcctcgttaacaaagcttcttttagtagcagagatcaccacagaaagccacaactgggcaaagaacaaccgaccatgaggtgcccaatcccaactgatacaaccatggtaggaccccctacatcagctcagggaccacctcagcacaggagacgaaaagagtgtaagagacagaggaccagaacacctgttaggagctcatgtcttccacagataaattgcaacaatgtaactgcctaaacaagatctagtctggctggtagtgcatgcctttgatctcagcaattgggaggcaaaggcaggtggatctttatgttcaaggcctgccttgtctacagatcaagttccaggacagccagggctgcacagagaaacactgtctcaaaaacaaacaaacaaacaaacaagacctgaacaatgacaacactggttgatataccaatgcagatgggggaagtcccgcaaggctccacccctagataaagagctaccggcaagtaatgactgatgagagagagaagggggggtggaaagagagagaaagagaatatcagtgttccccagggatgagcctcctaattggcttttcaataccaagtggtcagtcctaaaagcacatacatacgagcaccaccaaatgaactcagtaggtcgtgttgatataatcatatatttatatataaaacaaacaaaacaacatactgacatactgataggcccatggaagttctaataggaaagaaaaggacagatctaggaaacatgcagaaaatgagaagatattattgactccaaggaaaagaaagttatacaaggaaggagacataattacagcatactttttagattttaatcagataatcattatatgatattcaataatataatgcaattgtgattaacaatcaaagtatagtgttcaatagatactcatttgactaaaaattatgattttcaacaaaagggtaagagacaagttcttttttttattaggtattttcttattttacatttcaaatgctttcccaaaagtcccccatagccccccactcccctacccacccactcccacttcttggccctggcattcccctgtactgaggcatataaagtttgcaagaccaaggggcctctcttcccaatgatggccgactaggccatcttctgctacatatgcagctagagtcacgagctccggggtactggttagttcataatgttgttcctcctatagggtgcagaccccttcagctccttgggtactttctctagctaatagacaaggattaagacatagttttatgtcagctatcagcaagctaagagatggtttccaaaccgactctctaagcacagtgttgttagtactttctctggcacgcatggctggacactggtgactgcggctttaacacttttaggtctaatgagctttgtctgacttgggtcctttttgtggaactgccataaactcgttcttcacccagtttccaggggcagtgtcggaacagaaagttgagcatccaagtttgggggttggagagagagcccagcaagtgaaagcacttgtcacacaaacctgacctgagttcagtcactgggacccatgagaagagactcaactcctgggagttgtctcctaacctcttcatgtatgtggtatgcatgctcatgtccaccctgccttacacacacacacacacacacacaccgccaccactaccaccaccatctcctcctcctcctcctcctcctcctcctcctcctcatcatcatcatcatgataaattaaagtccttgaaaagagaatgcaggtttctaattcagataggccaagtattcagcttgactttgccattctttcttttaaagatttttatttaagataaagtataaaattttatatatgaatttatacatgtacacacacacacatatatataaagatttgttgtcaagttgacaaccaaaattagccaaagttatatatgtagtctgtttggctggcatgtatgtctgtcaccacatgcatgcagtgctcacagagtcctaaagagggcgcaagaatccctgggaactggagttagagatggtggtacactgccatatgggttctgaaaattgaactcacatcctctacaagagcaataaaacctctttaccactgagccatctctccagccccagctttcccacatactttgcttcactttatttgagagccttgacagatagctcaggctgaccttgaacttgtgatcctcttgctattttacctcctaagtgctagaattataggcatgcatcacatgctgccagctctcatcagagggaattcttgcagtatttgtcacatagtctgtgctcgttaaatgtaagcttgtgtgtgtgtgtgtgtgtgtgtgtgtgtgtgtgtgtgtgtgtgtgtgtgttgtcttcatgttaaactccagttacactggtcttcttataatgacagaaccaaaggaaagttcatgaccaactcaactgaaattatccaagtttattacagcgattcctaattaatctccatagcttctatggctaattttggttgtcaacttgacacatctgggaagaagaaacctaattgagaattgcctccctttgcctgtgggtatgactgtggggctttgttttgttattgattgatgttgggaggctcagcctaccttgggcaatgtcactgctgagcaggtggtcctcagttgtataagaaagcaagccaggggaagcaaaccaattagtagtgttcctccatggcctctgcttcagttcctgcctctgggttcctgccctgagtttttgtcctggcttctctcaatgatggatcaagccttgtgtcgccaggttgcttttggtcagtgttctatcacagcaacagaaagtgaacgagaacaatgtctctaatcattcacttcaatccatcttccacaaggctgccatggcctccttctggaataaaagttttaactgctagctagtattcaaagatgccctcaaaccactctgccctctcagtatgcatgcctctccctccatcagaagtccaacctaattcctcactccataaatgagtactctacccatgagtactttgaccaacacaatacataggagatgaggtctgaggtcttgggagtctaggcatcaagaagacctggcagcttgtaagacaccaggaagaacaagctgagaaagtagttacaggggcagatctggaatgatggacagagtctcatgcaggtgccagacatcccaccccaaccatgccattgccaccttgagactgcaaactaaaccaagaaaggcctcacccagctgagctccagacaccacagaatgctggggtaaacgcagtggcactgttccacccagtgtgagtgcctcggtatgctgacgctagccttccacttccttggctcttagaccacgtttcttaatgaggcttacaagaaatcagcatgcactatgtaccctggacacgctatctccccacttagtgtgtgtgtttctactgcattgaggcagaacctgacttgtacaaagcattcaatgagtgttagccatcgtcccaccatcattgcctggccctgcttacctcctagtcactcctagtgcatgctctgtgggtgcagccattctaaaatacatttgtccctatcatgtcacactccacactttcctggtacatgtcccttctgcctggagtgtccttccttcaccacatctgccatgtatactcttgggaaagctttttttttttttttatctccccagtcattagagtatttgcccctgtgattttctgagtacctagcttttgtctttgttgagggttttctcttctgctacctgtatgacccctgcctccctagctgaattctgaagaatgagtgaatgcctggttcacaagccagcaaagcacgtatgctggctaaatttatatcggctcgactgaagcttgagtcatctgagaggtgggagcctccactgtgaaaatgtctccgtaagactgggctgtaggcaagcccatacacattctcttaactagtgactagtatgggagggtcagcccttgtaggtggtgtcactcatgggctagtggtcttggatgctctaagaaagcacactgagcaagccatgaagagaggatcggtaaacagcactccttcatggcctctgcattagttcctgcctcctggttcctcctgtctgagttcctaccctgactctcttaagatgaagaattataatatggaagtgtaagcaaaataaaccctttcctctccagattgcttgattatggtgttttatcacagcaaagggaaccctaacaaagaaattggtaccaggaagcagggtattgctgtaacagacctcaccaagttgtttggggaaggaccgtggaaggatattgtatatttgagctaggaaagccattgagcattcaaaggttgatgagctgttgtgagaacttggaagatgagcctcagagcagtgcaggggatggaagcctggctggtgaagtttcagtttcagagggacgcaaagactctttcagggccatttgatgttcagaatttagaatcggtggctctagtcagctgtggccaaagaatcagctgtgattaacaagagacccagaaccactaaggtgaaactttggcttaactgggacagttgatgccagttagctggagcagagaagtcagcagtgcctaagaaggggccagtatcacaccagtatcacaccagtatcgcagcaatagaaaccctaactaggacaccaaggcacacaaatgtctttttaaaagaggtttattttaattgtatataaatgtgtgcatttgtgtgcaggtatgtgcaagcatgggtgcaggtaactgtggaatccagaagagattgttgaatcccctggagctagagttagctatgagctgtgagatgcccagtatgagtgctggccaacaaactcaggtcctctgcaagagcattgtacgctactaactgtcagccatctctccagcactcagaaaaatgttaatacatatttcaggaagggaatgaagaaatggttgcttttacaatagtgattctcaataagagagcggtgaggaagcagttctatctcctaccacatcggaaacatctagagacatttggctattgccctactcggggaatgttttactatcttgtgggtggcagacaatgatgatactcacaccagacaatacacaggacagttcctttcaacaagccattaccttgacatagatgagattgagaatttttgtttagaagaccatcacatgccagagacagacagacagaccttccttccttccttctgccctcaacagggcccactattgattttctatgcatggtccttctgagcctgcctgccatctatgattttgtgacagtaatgtggtgtctgtttctttccttgctaaaagctgttgatactgcacagactgtcacatgcccagaaaggaaaaatcccagagagtctggtctgagtcacagagtgcttgtgttacatcttggatggctcaaaggacctcacgtgcctgggatgcaggctgcctggctgcccaaagagctagcctgaggctgcacaaaaaaaaaaaaaaaaaaaacgagatgggggcaggtgacccttgaaggttgtggggctaaatataatctaagaatccttgtatttgtcacccaaaggaccttggggagaggggcagaaaaacatgagtgacctctacatctttgtcccccaggttaagagcacctgctgctcttccagaggttcaaagtttgcttaacaacaccctcaccaggctcccagcacacaaaactccagccccaaggggacccaacaccctctccgccttcctcaagcaccccaacacaggggacatatatccacacagacacatgcatgtcataaaaacaacagaaataaatctagcctagtgtggtagcacctgcctttaatcccagcactaaggaagaagaggcaaatggatttctgtgagctcaatgccagcctggtctaaatagagtttcagcctacccagtgctaggatgaaaatcctgctaatagatagatagatagatagatagatagatagatagatagatagattattttaaagggttaagaaccatcactctacagatgggtggtcctgggatgtgggttcggcagtccggatgatgcccacactgtgaggggtcctgcttactgttattgccagtttcaaaagagcagtagaatgcagaagtaaacagcttgaatcttacagcttaatcagacaggcctgactgtgaggcaccctcctgtcgctaggcagtgacctggagagatgactttgtcatatctgagcctcctccatgtgatgggaacatgctaagtacccacttccctgggttgggctgcaggtccattgcgagtatgagagcctagacttaacacacagcatcactgaaatatgtgacaggtgtcataaaaggatgctgtagcaggaagacacaggtgagggccagtatgggcagcccggcatcctcccagaagtttttctgtccaggtaggatgctggtgaaccatgatgctcaccataagcacccgactgcagtgagtgcttcgtctatggcggctcccatgggatattttactgccccaactttatggatggaataatgagacacaagtttactcacagcctgttatcctgctgtgaaaaggggaagagtcatgacaaagacggtttggttccaggtcccttcccctagctgcacatacactgcccctgaatgcctccggaaggggaagaaataaaaagagcctgttccctttcttgttcccaaataccttctccacccgtaatagcagaaagtgacaaatgcctaggagaggagcactagctctgcccaccaggatccactgtgagggaagcctgcaaggcaagatctagaagcgtctgcagagagccgaataagagaagcactgggaggcagatgaggctcagaattgaataaacccggactccacctggtgacgtagggtctctgagcccagagacatactttctcaaaattttatttctccctgtctgaaacaaggcttagacacaatatcccagctagctctacaaggctgggctgaactggtggggaagaggctactgcatgctgggaagtgggaggagggagttggtcagaacctatcccggtaaaagagcgccacctggtgaggcactctgagaacattactggtggctgctctgaccagatcattgtaacccaaggaagccgcttctagtctctgaatttcagaacttacaaggacatcggaagctagcgatgatgataatgcctgcaattgttaactcctttacccacacacattctcttaaccacgctgtttcaaaatggcaatgagttgtgaagaatgcaaagaataagtggcgatcctttgttctggaaatgctgttaagttacttattttcccttaacttttgtttacttagggtttggatggatattcttgttgttattttgagacaggggctcactttatatctctggctgggtataaaggctaggctgtcctcaaactcacaagaggtcctctgacctcagcctcccgcgtgctgggattaaagtcatgcaccattatgcctagctgtttgtttgtttgtttgtttgttcattttagtttttcaaggcagggtttctggctgtcctggaatttactctgtagactaggctgacctcgaactcatagagatcctcctgcctctgtctcctaagtgctgggattaaaggagtgcgtcatgcttgtttttagtagtaagcacacagcatgagactttcctatattcaggcagggcggcactgactccggcgtgatgttgtataggtcttaagaactcacccatcctgagtaacttaaacgatactgaatgctgctgattacatgattaaccttgtccagaataatttattcttatgacttcatttagcccctcccccaaggaaccacgtgagtggaggaggaaccagaagagtacagcactcactgcgtcagcgcctaagactctgccgacttgaaaagtccacactaacacgtgtaatgcgaattacacttgataaacatgcatttactaaagccgtatgaccactgcaggagagagaggttgttctcacagttagggaactgtaaatgtgctgcgtttgaatcttaaatgtccttcaaaggctcatgtgttaaacagttggttcctgggccaaggtgttgctaggtgttgctaggaggaggtagaacttcaagatgtggagccctagggggaagctttaggtaatagggaaaggcaagacctgagggaattatgggactctggtctcttcgtttatctgcacctgacgtgaagggctctcttctacactgtgtgttgccactataatgtgccacaccacgggttcagaagtaaggggaccaaccattcacagactgagatttccaatctatgggctaaaatacacggttccttttgacaggtttgttgtctccagtatctgtggccgctctggaaagccgactacacaaggtgctgggtgctgagcattggctgatgtttagaggtgcacctgaccaagggactggggagtcagtcttcatgctgaggaaactatccatttggaaagaggcagagacatgactaagccctttgtaagattgacatacaatatggacgcatctagaagccagaagagctgacttgctctacggaaagaactgtcaaaatggctatgcccggggtgattctgccccaagcatctgcatccctcatgagggctctgctcgaagactatctgccccatctttccttttgacatctcagctccttaacaacacctgtgtcctgatctcctgataaccagagcccaacaaggagcggagcaatggctgctaaacagatatttattcagaagaggcctctaattcatctgtctttcccccagtccttcctcttgttcctggtacccacacagattagcccctagttcctcaagggacatctaaggatgtggagattcagaggcagcctccagcctaaacaaactaatgacgcctcacagatgcggctcttcaccagcccccctggcacaaggtcaattaagacagtaaagctgacaacaggcacagatgcccttcactgagccctcactccgtgctagcctgctgctaagccctattgcatgaccaaatgactgcccatcccaaatagggtatgtgctggttagggatttttttgtttgtttgtttctgttttgtcaactgacataagcttgagtcatctgggaagagagaatgtcaactgaagaacagcctctgtcacattgcctccatcttgacagatggttgatgcggagggcccaggccacaggtgctgtccctggccaggtggtcctgggctgcataagaaagcaggctgaacaagccatggggagcaagccagtaagcagcactactccgtggcctcttcttcggttcttgcctccaggctttggcttctgcacttaccctggctttcctctatggtggactatgatcagaacatgtaagccgaatacactctttcttcctcaagctgcctttggtcctaatgtttaccacagcaataaaaatcaaattaggccagaaccctagtgacaggccaaagtacaattctccccaggtctcctttggttacccccaaagcagctgcatcatcacctggatttccccatatctgtacagatggaatcctctccgtgtccctaccccgccttacacgttctaatatactctagagcagtggtcttcagccttcctaatgctaaaaccctttaatatagcttctcatattgtggtgactccaagcattaaattattttgttgcctcttcataactgcaatttcatttctgttatgaatcataatgtaaatatctgatatgcaggatttccgctgctctagtgtctcctgagcccgtgtgcagctggggcagaattacatacagctggcagagagggaggcatgggagtggttaaaatctcaggtgagggccaatgacctaccctacctgttccttatataaggcagcatccacagtagtcacagctaatctgacaatggccatgttcagcttatcgtccattcgtttgttcattcattcaacagatattccctgtgtagtatcttgacccgggtactactgcagggtacttggaccacaaaacaaccagaagagtccctatcaagggaaggcagtccatgagaaagagtgaggaggaagtgtaactgtttccatggcgatgctctgcccagcatcaacgtcccttataagagatggccaaggagtatggcagaagcactcatggctccagctagattctgtcactactcacctttccccagtccagcctttccaaacttctagagagagcttaacctctgaatgcacaagccagccagagggcacaggggctagaaatgctaatggtatggcatttctttaaggagggatggtaacctggtaaccagggttccatacaactcagccagccaaggagatgacaggctcataatcccatgccatagggattgaaggtgtttcttaaccaaatgcagattgtgtttaataggtggctgaagagatggctctgtgatttagagcccttgctgatcttgcatagagtccaagttccgtccccagtatccacatcaggcagctgtcaatcattcatccatacttcagctacaggggaatccaaagcccttgtctgaactcacatgtgcaaacccatacacagagacacatacacatagaaataatgcaagtaaatcttttaaagagataattttgtgaatgggttgaaagacgattttaaaagtcttttgcctgttgcttgagaacagtttatggattcctatcagaagtccaaaacaaattctaaatccatgaccaaaacagctaagactaaataacccaacacagatggcatattcagcaagattgacataggtcctaaagagagaccataggaagatctcaagggcatgtttcaagggcatgtttgaagtaagaacagcaaaaagttcattggtattgtaaacagtggaagcaatcctaatatctattggtgtgggaacaaatttgcatgttcacaaccttgaggtttctaagtctgggcgcagcaccatcctatgtcttgcatttgtgtacaaagtcactcacttgggggattgttgataatatatatatatatatatctcagatatgccctctgggtgtcagaacctcgaaaagttttaaacctgcctgggttgactcgtgtattttattttgctttgttttgttttattttatgtgtatgggtgttctgcctacaagcatgtctctgcagcacttgcaggcccagggactgtggaggctggaagagggtgtcagatcccctgggatgcaccaatcatgcccacctttgtcgtgtcctatatgtttacaatggggatttgtaagactccgttggtggctccactgatgatagactttgcatccttgtacattatcccccccttcctgactctgggtggccatgcaattcgacttttgtcaatgaaacacgaccaagtgtaaagcaaacacagcctagataagtgcttatccattggtaccagaccccactgaaggcttcctttagaaatccaattgctgggtaagaagtatagacaagacggaagggatgagaaaccacaaggggagagggattcatcctcgtgtcttcgctgagcagtctcatgaggatccccaggttatactcacagaatctcctgatcagaccaagtagttaccagaaacaattgctgttgtatcacaccactggcttttggagcaactcctgtgtaacagtgagtactgaaagagtttctgcaggatatattcccctcacctcacccctccatatccccatcacttcacccctccatatcccttcacctcacccctccatatccccatcacttcacccctccatatcccttcacctcacccctccatatcccttcacctcacccctccatatcctctcacctcacccctccatatcctctcacctcaccccttcatatcctctcacctcacccctccatatccaggcacctcaaccctccgaaccctatcatcagcctaacattattttctcctttatttcagatagccttggaaatgctgtcccttcctgctccattcgactggcatccctaggacaccttcctaatttacgttgctctacagagtagcctggcctttcagagaaaatcctggacagtagggcaatggccttcacctacttttagaaggaactaagattaaaaacaccaaggcacagttaacctccaatttaatgtttacagattcaggcaaacaatattttctggatgcttgtcatatgctaatttgaagtactacagtcattagatacaagagagtactagcctttactcagtgagtctcttttaacaaacagaactaacactacccaaaacgccctttttgttataaagatttaaaaaaaaaaaaaagcaaattatttctctaggattattaagctaatcagtagcagtgccaaactgagagatttccttttattataactagcaggttgaaataaatgggctcttccccagtgaagatgggtaaataaaatagttgccaggtctgagtttaattctatttttaaaaataagcaaaaagtataatgctccacctagcgagcactcactgccctcttagcacccacacctctcttttcctgctcatgttctccttatttcaagtaagttttttgtttggggttattgaacttctaacttcatgagtggatctggtcagaagatagagggcacagggtcctgtgctcacagccaagcagtaaagaaactaggaatgctaaacacgcagacttgcctcctctgtgagggaggggcatacctgtttcctgagcagagagctgggaatgaatgtagctaaggagctggttacctgtgctatctgtagggccaaaccacacctgaatccctcagaggattatacttctccctggctcttcctccccagccctttatcttgagcattgtttctcagtcaatagaacccatagctaggggaggagtcacatgtactttagaacagcctgggtaaaccacagcgccagggccaggccacacctgactcccacagacttttatgtttatctcactcattctccccagactcttatcttgagcattgtttctgagacaatagaacccatcttcaaggaagaggtggtatgtagtttgtaaagagtttcactgtgaacatggcttaagctttgttttacacaggagattgagttcattatcatcaggatacatttttccaaaaattgtactgtacttaaatatgcctaaaataaagtgtccagtgttagactctagaaccagcactggctcctgagtcgtgttaaactggacttgcttcttatctcatttggattttttttttgcaagccctggtgatcatagagacccccacattgagtattgaaattggccacagtaattgggttagggacagacatataagtatccctcagaggccatgtgttgaaggcttggtctctagtctgtggtgttatcaagagatggtggaatgcttaagaggtgaaacctaataggggtcattgagaacatgcctttgaaggagaccctttctccccacctctctctctcacacacacacacacacacacacacacacttgcctcctgactgttgtgaggagaacatgtacttcagccatgacagttcccctaactaaaagcccaaggcaatgtggtaagtgaccaggactaaaacccctgaaaccgtgagctaaaataaaattcctccttttatatataagttgattttctaaggtattttgtcatgaaattgaaaagctgactgtcacacattccaattccataaagctagtgacactttatgggctgtttgctggtgtgtctgggaagggacagcctataaaagctaatcaaagagacagcctacctttgcttaggtgtggtacaaggtggcaaggtctcaggctgtgacaaccagctaatagctcaataaaagaacctcagttgggcttgatgtttacggaccagcaatttaagcactctgcagggaggagacagagctctgtgaatttgaggccagcgtgagtctatagagccatgtccagatcaatccaggatataaaaggagaccctgtttcaaaaacaaaagcaaaaaagaactaacaaaaattcagaacggaccacagggtggatttggctttcaggccatggtttcatctgcccctgctctgaaatagttcctaatgtcagtaatacttggggattggagagatggggaggaataagtaggaaggagcagccatgtatcatccttacctaccctgctgtaaactgggcatatgctgtgtctgtcaactctctgctatcaggagtgagctgagaactgcaacacgccaccgtggctagcataatggatgtgtgtagcccccacccttgttctccaatgcatagagcgcagatgtactctgtccctggaagtccagcaaatctcctggcattacattaaagtcatggtcagctggagtctcaaggagcatgacatttgccaagaccaagcctcagacattggtaaagaaactgggtgctggttatcaggccaggcatagggccaagctgcctccagtgctgcccagaaaaagagacgactacccagacaaaaaagaaaagaaaagaaaagatgctgatttctctagccatcaggtctgccctgagaactagaagcaccagcgttgtaggtgaggaaactccaggcttccagctgtgggaagaggacaaactctttacctgaggggtctatagcaagataaagcccctccaaaccatggtggcacacgccttcaatcccagcactggtgaggcagaggcaggaggatctctgtgagttcaaagccagcctggtctacttcaaagcgagttccaggacatccagaaactctgttctgaaaacccaaaccaaaccaaccaaacaaaaaaagctaagtccctgtgtgggtcctataaatccctgtgtgggtcctatctatctctttcactgcagggacactttatgctctcccttcctgagggcctacgaccagagactgtgctgtacccttttgtggtcgctttcttttcctacctgggttagacgtctatcccccgtgctcccatgtgctctgacatcctgtttaccatatgtaatttcattcattcatttgttcattaacaactttgttttgagacaagatctcacgtaacccaggctggccttcaattagctagctgtatagctgaagatgactgaaattctgatccttctgcctccacttccaaagtgctgagattagatgcgtgcacggccacttgtactttatcaaacccacagccttgtgtgtactagaccagcactctaccaactgagtgacatccccagccttacattatccttcaagttccttttatgtgccaagtggtattccaggcacagcgctgaccagcagcacagtacagaaataaacgagacaaacaagattccctgccaccaaggagttacattctaaacaaaaatgcgtcaattatcacccatattctacgtgagtaaatgcaaagcgggaacccaaggataaaaaccagcaaggaaatcactggtaaaacctcatggagaaaacagtaatttgttgttgtttgtttgtttttcgaggcagggtttctctgtgtagccctggctgtcctggaactcactctgtagaccaggctgtccttgaactcagaaatctgcctgcctctgcctcccaattgctgggaagatttgcagtgattctcaaccttcctaatgctgctttaattccattcttcattttgggggtgacccctaccatgcaattatttttgttgctacttcattatctgtagctttgctactgttataaatcataatgtaaatatctggtaagcaggatatctgatctagggcctctgtaaaagggttattagatgccctccccccaaaaggaggcataacccacaggttagaggctaagcatccacaagccctctcactgtctggtggtgaatgtaatggtaactgctaaggatgtcgagcggatgcccactctgtcagagaaacttcaggggagccagtatgggaggagaatgcagttggggcagggtaatgtttggggtgttgaatgggttacagaacaccccaaaccctatagttggtgagtagtggaggatcctcagcagaggagatctttatcttagtctgttttaagctgttgaaacaatgttacagactgagtaatttattaacagtggaagctcatttgcctcagggttccagactaaaaagaccacgataaagggttgcatcccaagaaagctgctggggtcataacttggcagaagacattgcatggcaacggagggagagagagaggacacaggaagctggacatactcttacattcatccattcatgggcgttcatttcctaatcacttcttaaaggtcccaccactgattcttgaaatgatctgactttattttatgtgtatgggtgttttgcctgcatatatgtctgtacaccatatgtgtgcaatgcccatagaggtcagaagtcattggatccctaagaactagagttatgcatggttgtgagcagctattcggggtcagggagcctgaatcttggtcctctgaaagagcagccaatgcttttaaccactgaggcatctctaaaacttgagttttagatagattatttcaatcatagcagcgatggtggctttcttactgatgttatattaaaagatcacaagtcactgtgttccagaattgctctgagaagtggactgttagctgtattaaagttttgacacctgtgtgtctagccaagtgtccagacctccctccattcatttgacaaactttactgagccagacaccagggcagggtgctaaaagcagctgtgagcattgaggtttgagtcttggctgtcaagaagtgaactgaggagcagagaagacgggtcaccagcagcttagctgtctaagaagaaagttggaatgtgtgccccttaacttgtactttctattgatagacagatggtttattttctgaggtagccatggctgaactccattcataaaagtgtatcccttgaaaatgctttgcttttgagagaaacacgagattcccttttaaagataactcccactatcaataacttgtaatactataataatactataataataaataataataataagtcatgccaaagtgcatgtgaggtcagaggacaacttgtaggaataggttctcttcttcaggtggaacccaggcatcacactcaggagtcaggcttagcggctcctctacccactgagccatcttgctgcccctccctggcctcattaacatacatgtgctgtacataacaatgggtttcattctgacatcttcatccatgttcataatgtgttttgatcacagtcacctccatcaccctctcttgtccccttctcatggatccccttcctctttcctgtagcccaaagcttacagtccctcttctgcttcgatgtgggggtggggcagaaccccagtatgttcaatcaatcaggctcgcataattacagcaatatggatgaaggattgtttacagctcatgagcacatgagcatcttaccagtggttatgcactgaagaaaatgcctctgtaccccccagcaaccatgaactgcctgatgggcctcctgagtctctcccctctccatgagagcatgttggtaggccccaccttatactggtcttatgtcaataatcacagctgaacagtgagaaattgttctttaaaaaaaaaagcctctatgtattgtcagtcaataacaatcaaacacagattggagaaaggaaaacagaaatgaatggcttaaattgtgtctattatcaaaaagccgtctcaacagactcccaaggtcaaattcctctttgtgtaatgcagttctgcactgtcacatatctcacaaaagtgggtcaccagctacagccaaaagctgggttggttgctttgttggttggttgttttggttgttgcattgttgttgttgggttttgggttttggggggggtggtggtggtatttcttttcttttttaatgtgtggtaattttccctatagttttagaagttggattttaaagtcaaaccgatacttttgttcttctgaaggaatgcatcagatacatttgtttcaaagcctgccttgcaagcaattgattccatccttttgattccatccttgttccgcctcttcactacctctttactaccccactcagcgtcttaaggaagagagaaggctgcagaaagcttgttttgttttggcttttttttttttttttttttttttggcctgagaaactgggactcccctgcctttcagagcacaaaggtctattctttgaggcaaggggccagggaggcggcgtaattgaattttgtaggccactgtgtacttccttcttcctctctcctgccaaatcaaggctcatagcaatcccagtggaccttgaggggcagtcctccatgaaaaagtgaaagcagtcgaggaaaaagaaaaggggccagccagaagcagcccttctgagaggctggggaacgctcattatagttgaatgagcccatgaaaagggctttttctgagcagccttgatggggccactggcttggtcccattgtaaattccatctgtgtgctatcacttcctgacccagaaacgggagagaggttttggccacacatttccctaaggagatgtgccaggcaggctacacgaggcttacaggctcccagagatgaagtatataaagctttaagatcatgttggcctgtaatgaattccttttccaaatttacttactaaagggtctgtttctcaccccccagtttcctttcagaaactggagcctaagtgaagcgaaatacaattggaatcgctgcaaggaaacttctggagggaaacaaactacctggcttcctaggaggggcttctaacgtgcagatgcctccaagcagaagccagtcacacgtcaaatgtacagagggaactgagagactgaggtgtaaataagaaaatcaaaatggtgtgcagtggtggttctcacactgcgccatgtttggggacgctctgatagactgtggttcaataattttgaggtggaggcctgagaatgtgcatttctgtgtctgtggggactacatagtaaaggcctctgaggcagagagggctaccccaagcctcagcatcaagcaagacatgagactgaatcaaaggttcaaaaacatcttactcagagtcagtaaacacatcgtggtgcccagctacagacacaagctagtgctgtatatggtcacgggtcatgatgttccatctcatacaggtttgatgtaatcaaatttgactagagaacaaagcagttgtgcaaatccatttctagcccttatccaaacaagacagcaaacatgtcaccaaggtaaggaacacctctaagctctggtccttatggaaagccacggaagctggaagtggtacatcctgatccctcctacagtctacccactgtactaggcagctgaaattataatcaccttatctggttcataggcaggcaccatcaatcaccactggcacaggcctcacccccaaggctgcctgattccttccagtccagcaccctttctaaggtgttggaacacggtccaggggtggagccatatgagaattctgagtcttgtaacttcagcgtctttaaaacgcagatttatttctgtgctcctcctaggagtagcagataggagtgagtttccttcagattcttcattataattagccattgttatttgcttatatgcctctatgggaaagcatgtttttgccgtttgcggcttgcccctgtgattggacactttactcatgtgactcctcttaaacctcagagtataaactggctgatgctctgaataaagctggcgatcgaggctttagcctggctcgtttatcagctctgttctcccaggtcccaccaccttcagaagagtaaaatctaggccatactgggaacccccaatctgctagtgtgtcctttgtgttcataggactctgactggagaacaaagcgagggttcctgctctctgtgtccggctgtgtctctactttgatcaggccttatcttctcatctccatctctactcatttcctgccccaaacaggagaccctttgctggtctgagagagaatctcctcgccccttcaaggtccttgctcttatcacactgtcaacgtcattatctttgtgtgtgtgcgtgtgcgtatgtgcgctcatgtgcatctgcatgtatgtggtgaaattgtgccactgtgtgtacataggtcagagtataaccttcgggagtcagttctttccttccatcatgtgggtcttggggactccactggggtttccaggcatggcagtccgcacccttacccatgaagtcggttcaccaccccagtttgcttgtttgtaatgtaggttggctttaaaccccatcccattcagccttctcagtgccagaatacctgcagtcagccaccatacctagcttccatgcctatgtcttgatgttccctgaatgcttcaagtttttcgaaaccaagagctgggggtaaaaatctatgttttggtttattttattccttctctgacattccgttttctgaggcaatgagcacaggacactctgcctgttcaaatgagatacaccgtgtgacagggagatgcttggaagtggacaaaatacatttattaaaggaacataatttagcatttgggaattaatattgccaatttggcagctgggcgtggtggtaagactgcaggctctctgcacccgctctctgtaccgggataagattcacagacaagaattgatggttattggttggagagatggctcagtggttaagagcaccatctactcttccaaaggtcttgagttcaattcccagcaaccacatggtggctcacagccatctgtaatgggatttggtgccctcttctggtgtgtctggagacaattacagtgcactcacaggaataaaataaatatatctttaaaaaaaaaaaggattggtggatattactgtttcttccttttgattttatatctaactacccttatatataactccctctcatctacctctcctccctacatactttttttttttttctgagacagggtttctctgtatagccctggctatcctggaactcactctgtagaccatgctggcctcgaacttagaaatctgcctgcttctgcctcccaagtgctgggattaaaggtgtgtgccaccactgcctggtatccctacagacgtattaatgtgtgcatatgtgtgagaaaggctagactatgagtagattttaccaagagattaatagtaactaaatctggatagtaagatattgaacaatttgaaatatttttctagttttgctttttctatatttaacaactttctaaaaagagtatggattacttacaaagtaaagccattcataggaaagtatagatgtttaggtgtttaggtgttttgtctgcttgtatgtctatgtacatgtatacagtactgaaagaggccagaagaaagcattggatcccctagaactagagttacagtcacttgtgaggttccatgtaggtgttaggagttgaacccaggttctctggaagagcagccactgagccatctccctagcctcacagagtgacgaattttaaataaggggacttgagctagggagataagtcagtgagtggtggagcacatgactagcatccatgaggacctgagttcaatcaatccaagaactagagatgctgaggcaggtggactcccatgatttcaagcccagcatgggctatggagtaagtcctaagtcagcctgagctacataataagaaaattcattattcatctgaatgactaccttatgtcagatactaggcaaactgtttttccatacatgataggtttcatttaaatttcacagtgtctgagaaatgctattgctgagctcattttaaagatgaagaaatgatggggggaggggaggctgtaattgggatgtaaagcaaattaattaattaattaattaatgggaaaaaatgaagaaatgaggcttcaggccaaatggattgatggactagggaatacaattatacagatgtgtacaaaaatgcctggatacctttatatacactgtaccctaaggataacagacagaggtggcagctatttaagcctcaaatctcaggatagttacctgccccagccccatatatcctaataatcatgctctcttagttacctagttatagtagatagaacaaactaaccacaatgctttagggctcctcctcttccttctttctacaattttatttattgtttttatttatgtatatcaatgtttccctaaatgtatatatgtgtactatctgtgtgcttgatatccactgaggccagaagagggtatcagatcccttggaactggagtttcaggtggtttgagccacttctccagctcccagggtcccttctttcaagaaggagatttccattcctcaaatctgagctggcctcgagatctgctttgacagacaaactgtgagccccaggagacttgtggattctacctttaagagacagaattctatgttggaaatccaagcctgccacagtgtgacaaagcccccaaaggaaagaccctgaagaggcagaggctcagtcatcctttgcagcccaaataaagccagcaccttggtaaccttccaagtgaatgcagtcatgagtacatggaaaactggcagaaaaatctacccaaagaacccacaaaataatgggaagaactgtaaacatgcaccacttgatgatgcctcagaccgcaaaagatgcataggatgtggccccaaaaggtttcattacccagggaactagttacgcagacagaatgatgtctgcacaccaaaacaacttctcagaatacatctgcaccactcagtgacaagtgattgttgactgaggccagtaaactgggaagggatttattataaagcgttatctaattgataaagcttgaatttacctatgagcaaggtgtcaagtcactgagatgcctgtggtttcgcatggtacaaaaccttgaagtgttccttgtgcacaaatctagaccaaattccatgcccagagaaggaacacagtctcaccctcccttccaaatcctcttctctaaagggagcaatctactactaaacagattctggcgagaaagaggaaacaacaagaaacaaaaaatgtatcaaacgagctctttctgcttgcaagtgaactgtctgtatagtaaaaccggtgagaaaccattttccccctttgtcgtcacagcacattgggtttctgcccctcaagatttactggcttgtgaaatgtattaactgtagcagaccgagtttcaattacaacagaaggcaagggtcatttacctacaatgaaacggcgcttcaataacacactcccaagcaaaaggagcttggtacaagaagcaggagacagattgttactggagctgccgggcttatcagatatgaatggctctagccaggaaatcctgctcactccaaacacgattcagaacccactgctcattccaggagatgcggcttccacacgagtagttccatctcaaaatcaggaagtgcaacagtaagaagaaactcttgcttgtcagtggctggacagctatggtcagtttatagaatggcagcacattgtgtcattcatgatagccttaaaaattaagtcatcgttaacttaaaagcactctacctcggtttttataaaagaggtttttataaaagaggagcgcaaagatgataaaagcacccataaactactctggacctggcccagatgaatcacgagaccctggggtcgctggcctcagcaggggcttccgcagcccctctggtcaaccccgcagcctcttggtctttccttggtctatttttcttatttctaggcttgcttcctcattggtttccatcatttggtctctctggtttctcctcttctggactctcagtcccggcccccgccccccaccccccatccccacccccaatcccgttctgccttgtcccacaccgtgagcaaagctgttccccacaggacagcctgcattcctctgatggtggcacagagggaggcctctctcaggcagggtccactgcgcagtaatttcactcacttctttttctcaaagactcctgactctgcctcaccctgtttctctctgcctctgtctctttttcccaccctgccaccaaatgtgtcttgagatcaccaatctgagtgtaatagatctgaagcctgggtaactacggggggttttagtgaggaattttgggagatgtcaatggaatgcagagcaaacattctgccactgagcacaccccacactcaactcacagacagcttttaaacctgtttattagtggctggggaaaaggattcatgtgtggaggtcaaaggacaactttgtaaagccagctctctccttacacctttacatgggttctgggactcgaactcagctcaccaagctcgcacagcaagtatcttttcctgctgagccatcttgccggcccacacacaacttccaaatgacatttacaaacattcttccagcgagtagtcctatatatatcttctaagatactaaagaataaattcaatttaaatccacaattactgaatgtttaccacaccccaagtcttagcataagatttgggctccgtcatcaaagagaaaacttgtcagaagaaagacaagcaaatagccaccagctgtttgttaggggctgggccttagctcaatagtagagctcttgcatagcacacaaggccctgggttccatcccagcactacagaaacaacagtcagctgttgggtggaaaatggtaaatgatagtccctacctcagtatctccaatgggaaagaaattctcaggtacttatttaaatacaaagataatgagagtgatgacaacacctgcttctcagcattaaaactctagcgatcaaatcagaacatgtgtgttgtttagaatgcacagtcctgagagtctataattactgcaaagtaaaagagttaaaagaaaaaccctagtgtaattgaatgtatcttgcgactgtatcactcaatttcagtactactccgtcattccctcagccactctagactgaagccactctagattcactctagactgaagactagaaaggaaagggaaacccatgtgctctgaaataaagcacccaaagatctaaaggaatggagacagacacagaagagatggaagatggtgtgacatgctggggcaacgctacagacaccatatcagatagtagatcagagattatacatcccaggcctgggaaggagagcagcagcatgggatgctctggaaatagaacataatagcagaggagcactggctcagtaaggctttctgtgtgccagtcagatgtccgccatatgacaagtaaggttctcaatgagaaacgcttgacagaggggtccccttctttttaagtgtgtgtgtgcgcgtgtgtgtgtctgtgtgtatatacatatgtgtatatatacatatataaatatattgtatatatgcgtttttatataataatacatttattatatgtaaataaatatataaattttaaaagaaatagggtggctgtgagatggttaaggtctttgctgctaaactggaagagctgcatttgatccctgggaccacgtggtggaaagacaactgactcccatgcttgccctctgatctccatacatatatatatacatatattttatatatgtgtgtgtgttcattatataatttaatcaatatataattatataatattaacactttataacataatattaatatgataattaaatgtatggtttatgtaatatataattataatatatttaattaacatataatttatatataagtatatatttattaatatatgtgtgtgtgtgtgtgtgtaagcacatgccactggctttatatttacatggaggatatgatgtgtgtatgtgagcacatgtgtggagatcagaggtccacactgtgatcagtggagtcaggaggaacaaactcaggttgctaggcttatgcagcaaatacctttacctgctgagccatctctcctgcccaaggacgttcttgaaaacagctagctcactggtttgcagagttgggtttggtggccatcaagtctcttggcctaggaaaagagttggctgcccagatggaaggaaggaaaccccagactaagtagagagtgacttgttccctctgttactgtgtgactctatgatgtctcttgactctctgatactcagactcttcatgggcaccatgggaatgtaattccacctgacctgacaagcagggtcactgggataatggttatagaatttgctttgtgaggctgatgagatgactcagtggttaagatcacgtatttctgatttccagtacccacatggtgtttgttttttttttaataaagaatgctttttatttgtggacttgttttgttttttatagtttgttgttttttttttttaagatttatttattattatacataagtacattccagaagagggcattagatctcattatgggtggttgtgagccaccatgtagttgctgggatttgaactcaggaccttcagaggagcagtcagtgctcttacccgctgagccatctcactaggccccccccacccccccccccacacatggtgttttatgcccatgcatcactccagttccaagagatatgataccctttctgacctctgtaggcagcaagcatgcctgtggtgcactaacatacatgcaagccacacacacacacatccaaaatgaaatgaataaatctaattaaaaaaaaaaagaaaacaaacaaaagaaaggctttactatttttcatccagtgttcccaaggtaaggccaggctggtgactgatctgctcactgactgacagccagcaagagcctctcaactaaggtaccttcgtcacgcaccacacttgccaccgtctgccccttccccatcccctacctccagccctgcacgtggtcttctgaggaatgagagtatgtacaaagcacagttaactgaagagagaggcatttacacagcttttgggagttcattttccaggctaggatgggacatttcactaaagaagctatttgggggtcaacacacccaaaagaagctattttagggttatccacactcctcataagcccaataaacacagtgaaaacagaagtgttagcttagggtctgaatgcttgtggccatgagtttaactgttctagccttcctctctcatcctaagttccaatagatacctcacaaaacaccttatgagttcatttactaaggaaaattctttaagaaaaataattaagtcagcttctatatttttacttaattttcaaactttgctgtttaaacctcattgtaaactacatcctcctgagagcctgagagatggctgggtgttgaaggaagaaactgagttcagatcccagcatccacacctggcagttccaaatcccctgtaagtccagctctggggaaccggacaacctcttctggactctgtgcagtagcatctacaggcacagagcctgtatgtatggacacaaacttatacgcataatgtaaggataataaaatgaaattgtttttaaaattacatcttttaaataactcagtaacttagttatttaaattaacttaaataacttagaaaaccaccaaattgtataaatagtatcactgtgaagacacatagctcacacctatttcttgaggatgtgaactgccttgaagtttctctcactcttaaacttgaagtacgtatttatcatttctatctaataaacttgttatcttggcttcacactggctcatcctgcaattcttttttcaacgtagtcaagaatttgtttattggcggtctctacggggaaaactcctcaggctacagtactggtacagtactgggctaagtcccctcattaccaatgactgacttgatcttagcctgccaaagctgctagaacccgggcttttgccataaaaactgtagttacacaaggattctgctgattctatcagttagctattgctgtgtaacaaattaccctacaacataagagctgatatcaaaatagtatgttatttctgaagggaccctggccagcccaaggatggagagcacggctctggcagaccttgccctttccccccattccctctgccttactaaaactgacttgggaacttactaaaatcacattcctaaagccagcccccaaggtccattcccttatttctctctctccatttcctcctcctgaggctgactaccaaagtccagctatcgaagtattgaagtccagcaatcaaaagccccctctggctcacctaattggcatacccaattaaagttaaacacctcatcctaacaaggggtttctccttgtacctttataaactgccaatttcctatttgcctagtttgtatcctttctacccagaggcagccctttgtcccctggagacaaatatccctcccccttctcccttgtttccttcctgttctcccttgtcctctatctcctatgtctgtctctgagtccctgccttctgtccttctgggacaaagaaatctcctttgtgctgagaatttggtcttggaccaggtcctgagtcaatattttttctttcactttccactattttactagttgcttagatagtttttctgtattaattgatattactaccttcatttggaaggtttactggaacctaggctttttttatggtgttatctatttgtttgtttattaattactgaaacactgtaggcaagggtgacttcctacttgcattgtagccatggatgactgtgaactcctgaacctcctgcctttacttcccaagtgctggtattccaggagtgtaccactatatccattttatgctgggctagggataaaacctagggtttctagtatgctacacagacactctgccaactgagctacaatcccagacctatgtataaataaatctctgatcttttttttttttttttttaaagatttatttatttattatatgtaagtacactgtagctgtcttcagacaccagaagagggagtcagatctcattacagatggttgtgagccaccatgtggttgctgggatttgaactctggaccttcggaagagcagtcgggtgctcttacccactgagccatctcaccagccctaaatctctgatcttaaaagattactttttaacagaaagcattgctttgaactgactcaatggttaaaggcacatgccatcaagcctggccaccaattggtagctactatgcagagtaatgctttcagctactcctttaatgtgcataagatcaggttttcctcagtccacagagtgacctgggcccctgatccttgtaaacagagcctctcaaggtgagaccccaagaccagcagcacctgagaactgttagaaatgcaaattattgggccccaccccaaatctattgatatagacaactgaggacggggttcaggcatcaggactacctgggctgattctaaactatgtttatctcctggaaacacttggagaacttagtcgattaccaatgccagagccccactctcagagaatctgacttacataccctgggtgctgcaatccctgcaagatcttaagtgctctgcaattgactctaagctgcagtgattggacttcacttggaccttgagttcaaggttgaatgcaaggaagttaggaagctagggatgtcccagggggaaagtacagagagatttaaaggctaggaaacacccaactccccatcccatccccgtgccccagtgctgtgaatctaactcaaggcctcccacaggctactcaaggcctgagttacatcccagccagagattcattcttgcaacagctcatttccagttatcttccatagggcacagtggaagttacatcttgataaatccatcttaaggtcaaacaatcacaagcctaattctcataaacctgagacagtctatgtgtgtatacacactcacaagaattagcttgcatgatcaccaagggtcaggatctgcaaggtgagggccagggagatggctcagcatgcaagactaatgacctgagtataatcttagaatccttataaagatggaagcagagaaccgctccacacagctgtcctcaaacttccacatgcatgctgtagcatgcacacctgcaccaaaaaaaacaaaaaacaaaaaaaaaaaaaaaaccgcacaataatgataaataataaaagatctgtatggggagttggaggcccaagaaaaaaagatgttcagagagaaaaaaaaaaagaagaaaaaaaaaatcccagtccaaaggtagccaggcaagtaaagtcgtctgttagtctctttgttcagtttaggtagaaggatatgatttactacgtagaccagtttcaatgctaataatatctagaaacatacctcaaataacggctgaacaaatatttaggcattccatggcccagtcaagctgacacataaaattaatcatcacagggagtatggccttggattggtggaccagggtttcccaaacgctgtgcatgaggatctaggccagtgaaattctctaccgaaaaggcctctgtgaaagcacaagtcttgaggaaggctgtgtaataaggcacattaacatatcaaagctatgaatcatccctcgggaaagaagtgactcacaactttctcagcgttagcgtttgatcccagcatctgttttttacttaacacctattcatttcccacggaactaaagtgttgcacagcacatattgggaaatgctatgccaagccatgagaagataacacagacttggaacgtgggttggagcatgatgttttagaggaatctgacggtagtctacggtgatattaaagagtctagatacaaagagcccagccgtatctgaagtgatagaggctgttcttaagtgggaaggggggagaaaaggaatatgatgagatatgtaatggaaaagtatttgaatatatagttcataaagagaaaagaataatagaaaatcccaaactttggagcctatgaaatgaaagaataaatagccacagatgggggtggggaaggaaagaaaatctggtttggggacaaaggcatggcatattaggctaggggtgtagcttagtggtggagtatgtgcctatctgagggaggccctgaatttgaccccaacatccccaacatacatgcacagctgcacacatgcacacatacaagatatgttcaatttttgatgtgcagttttagggtcacagtagacagggggctataagaaatgcagcagttatctgaattctgagattttgtctgtaagacattgaaatgattcaccagcttaggactcatcagcacagagtcagaaactaagtcacctttaccctctttccttcaaccagaacaatcccttctcttttgaaaaggccatgctttttaagccagtctcggggcctcttgtgaattgtacaaagaagctttctaatacatccctgtgtactgtggcagtaggaagcactacccttcaatgaaggaagcctccggctccatgtatgcagcccatgttgattgtggacagaaacattaactcttcctgttgcgtgtaaaaacagaacattcacttcgggaaacctcaaagctctgggtacctaaaaccatcagctttcagatggactttataaactaaaacaaagccttgccaccttctcaatggactaataaggacatgcagggcgtcactctcaatcagttcagtgagtcctccccgtgtgccttctgtgtgcatggccatagtggtccaaggcctttcccctcctccattctgctctgtctgaatccgagctgtgccctgcttccccaccagctgtctgaattctgatcaacttgtttaattactttgggccttggcttccttatttatgaaaatgtcttttttattatttatgtatgcatttctgcaacaaatgctcctgagctcctacctcgagcccctacttatgctaggcagggtgacctctcacagtggcaaaagataatccctgtagccatggagattaaatctcacttaattcggtggggcagtgctggtgcacacctttactgttagcactcaggaggcaaaagcagggacatctctgatagttagaagcctatctggtctacagagcaaattccgggggagccagggctacacagagaaatcttatctcaaaagacaaaacaaaacaaaacaaaataccttcccccctaaaaaataatagctcactggattctcttttttttttttttttttttttttttggttttttcaagacagggtttctctgtatagccctggctgtcctggagctcactttgtagaccaggctggcctcgaactcagaaatccgcctgcctctgcctcccgagtgctgggattaaaggcgtgcaccaccacacccggctagttcactggattcttaagaagaagaagagatactttgtacaaattataaggcaggatcccagcactcgggaggcagaggcaggcggatttctgagttcgaggccagcctggtctacaaagtgagctccaggacagccagggctatacagagaaaccctgtctcgaaaaaccaaaaagaccaaaaaaaaaaaaaaaaaaattataaagcacgatgtttcatgtgtagaaggcactcaataaatgctgttttccttatttttgataaatcaaagcacagagatccaagtgtttgtggaagccaacatgagcctgagaagcagtaaaactgtgcggacaaacatgtgtagtggccacgtcctcaccaaaggacaataggccactcaacaccagcccactgtcacaggaacagacatggatctaggatttttttcaattttaaagaaaagcaggggagggggaaatccctattttagatgtttcaagcctagtgtgggccaaatacaatctctctgatttgcagctgacccagagaagacggtgtcctcaaggaactctgggttttcattctctcggagacattatgttgaaaaggtaatggacccttgagtgaaatcctatttcactccagctcagtctcaatcaatcagcctaagtctcttcacgctccactgaaacaggaacctggagtgacagggtcattatcaccagaggaaagggaaatctcaccacgggtcatcagcttgcattgtgtaaatgactataagggatagatgggagcaaacaatggaagggggcacagcagagagcagcaaagcacaagcaggtcaagaatccaatcatgctgattggatttgaaggaatccactgagagacagccacatatatagccaagcactcaggtggtgcctgtaaggtggtcctccaccagggtgacactcattgctttcatcatctctttccactttatggatttaatatctggttccatcctttaaaagagctcatgattcccctctgtcctcgcttcctcctcctgcttcagagcagggcagatggaaattccataataaacaacggcagatgtgagaagacagggatatttgtgttgcttcagtgtggagccctaaatgaagctaacttaacagacaagaatgtagcagcctcatcccttctagaagcatctaagcattcctaatgctttcatttggcttcatagaaacccagtaagtatacttctgtgctcgtacaacctgcttcaaagttttctttgtatttagcccacgtaagattaactggatattctataagaccatgtcagcttgtagaccctagcgtcattcacctctcccagattctatcaagtgactcgagatagtacatgtttctcatatactgggagagtatgggacaataacactggcacccattccttggcatgcatgagacacatgagtcctataaaagaggtgctgaactcagttcatgattggaaggtgaccgtatgtgaccgtaggtgatagattgagaaattcttcaaaaagaaaaagtctaggctgtcagaagcatcaaagggaccaccatgaatgaaaaagttttgcaaatgaatgtctcattcagactgggctgccataaccaagcaccatagatcaaatggattaagtgagagaaaattgttttctcacaattctggagattagtttttttgtaagggctctcttctagcttgcaaaggactagtgaagatagataggtagatagatagatagatagatagatagatagatagatagatagatagatagatagatgatagatagacagacagacagacagacagacagacagacagagagaataggaatcattgacttaaagcaggagttatatagggttagagacccacacaattagtacctcatttcatgtcacttaacaattactttcttaaaaatcccactgtctccagagagagtcacattgggggttaggacttcaccatatgaatgggaacatggagggagacagacaggtcatagtagtgaactagtcagagcagcatgctgtagatgctaaagggacattgcctggttattccacaacccagtacaactcccccacactccccccaagttcaagtgttctttaactctatggaagaaaagcctaaagcaggaagctgtgtcactagggctcagagctcagctacaagaacatacccatgagaaagtgtctttcagatgcttgagagcatgaaggagattggaggtggtcttctgagggaagaggctgctaccaacacaggctgtagccaatgagctgtgtgctgatcagcatgtagaggaggctaacagacagtgtggtcagagagtgatgatgggcagtctggaaatcgtggcccagtgaaagctgagaatgacagtggaagcgaatggagcactatgcctgtagtcaaggggaatctcaaatggcagaagctggagacgccaagcagaaagtctgctgttccaatcccacccaagagccatcactcccctctcagtgcttctaacacatgccttccccattcagagaatcctttgagaaaaggagaatgggtaccaggctttctgctaatcgtaaattgaagtatggccacaaatgtcacacttatattcaccagtgagcccaaaagatgtgtgctacctgagttttcccatcaacctatagagcacacactggtggagtcctttttcccaaaccgttcgagcctctaaatacagattttctcaacactttgctaacaatagtagcatttgctctgtctaaatttaaagttaagttgagaagctaaaataaatagtgtttctgttttacaaaaatgaaaaccgatgctgtggaacagcactgtggttaagtgcttgctctacaagtgtgaggaccagcgtttggatgtccggaacccaagtgactatcaggagggcatggtggcctgcctgtaattgcagctgtggaaggtggggacagagatccccagagtgaactggctatcaagactagccatctaggtcagtttggggtttgactgagagacttcaatgaataggatggaagagcatgtgagaatgataccccactctccagcctcaccatgaacatgtgcaggtgcttgtacatatatgcaaaatgtgtaccaacacatacatgtacaccataaacacatacaggaaaaggacttgggggtggctggagagacgcctcggtggttaagagcactgaatgctcttctgaaggtcctgagttcaaatcccagcaaccacatgatggctcatatccatccataacaagatctgacgtcctcttttagagtgtctgaaggcagctacagtgtacttacatataataaataaataaatctttttttaaaaaaatgaggaaggaaggaaggaaagggaagggaagggaagggaagggaagggaagggaagggaagggaagggaagggaaggaaaggaaaggaaaggaaaggaaaggaaaggaaaggaaaggaaaggaaaggaaaggaaaggaaaaaagaaagagagagaaagaaagggacttggtgggagcctgtgtaaacagctgtcaacagcctccaagtgtccaagtagggaggtttcatctttgtggcacctgacctattcaacatctgctatgtgaatatttccttatcactctctcctctggtgaccccctttttcttctcaactctctggccactgttggtccaccattgtcaagccaggcacacatacaaaggcaggaatttaaaaaaccacacatgtacctgtggcgctaccaggaactgtcctaagcacttagacacttgaaacatccccaccctgaaaagcagtggataaaggtcagacacagaagggactgcactggctgcagactgtggtggcagctccatgtgagaactgcagttctcttcactgagcactggtccctgtgtctgctgtagagctaacctgaaggtgtcctaatgacctgaaaggaaagtgacactgagttggcccggctggtcagtcttgccaagctttagctccagactagccgactacaggctggccaagctccctacttctgtttggccttctcggtggcctcctctggcttgccctaagcatttatcactcagcaggagcattctcccgcacagctcctttccctggacgtccaagaagcctgagcgtcacctcagttttaactactttctttagctatgatttgcaccaattatgtaagctgctgattctgtgttctgtgcctacagagcagacacctgggctccagacactgccagcttaggacaggccccacaaacaccttatgccttgtgtttctaaaactgaattcatgacttccatctcccgccttcctcatatgttctttctggtcatcaccctggatctccctcagttcacttaaacatgcttgaaagccaaaatcatcaaaggtatctccgtttctttaaacacttctttggagcactgcagggatgactgtgaatcatactccctcttttgaaaaactaactttatcactggcttgcaggtgtggcctatgtttattgttctcactcgagtactgatctcataggtaggagtactggctatgtccacatcagctttctgagtcatctccaccacaaatccttgtttctcactcgcagtgcttctcacctgaactgctgtaatccagcgtcccttgttcagcttcttctaatttcctcgaaggtattttttttgtttcattggggtttttttgttgctagtaaacatttaaaaacattttttgttgaagtaataaacatctgctgtagatatcttggaaaaatattgttacagatgtttgttgttagtgtaagtatgtatatatgtgtgtatgtattatgcattacagccattttccctcaataggcatacctccttatatggaaaggattatattacacacattcttgtatgtcctatttttaaaattagccttgtgaataattttttatgtcagtaggtctctttgttttcattattaatgaaaatgtaccatcttattattagcaccattaagtttctgtatttcctaatcttacaaaaaatacactgtaataaacatctttatccatgttttccccctatgggataagaaaagccaaagatgctgctatttttaaaactctgaagctgtcacgaaacactctgacagaagggcttgatcctactacattcctactgtgggtgatcactgtaatgtacaacttaggttattgctgaaaactgggaagaaagttataggttcaagtacataaaagcagagaaggctcagaaataaggcatccatacacaatcaggccaatgtctccattatagagttcagttctcaacatccacactgggcagctgacaactgcctgttactccagttccggggcatccaacgccctcttctggcctccttgggcacctgcatgtatatactcatagcagggtagttgtacgtcaacttgacacaagctaaattcacctaagaggagggaatcttaatcaagagaatgccctactggaagcattttcttaattagtgatgggggagggctcaatccattgtgggtgatatcagccatccctgagctggtggtcctggtttctataagctggttgagcaagccatgagaagcaggccagtaagtagcactactccatggcctctgcaccagctcctgcctccaggttcctgccttgtgcatgttccaatcctgacttccttcgatgatgaattgtgatgtggaggggtaagcggtgagccgaataaaccctctttctcaagttgctttggttctagtggtctaccacaaaaatggtaaccctaagtaggacatacagaggcaggcaggcacatacacatacatgtagataaaaaaaaaatttaatgtagccgggcagtggtggctcacgcctttaatcccagcacttgggaggcagaggcaggtggatttctgaattcgaggccagcctggtctacagagtgagttccaggacagccagggctatacagagaaaccttgtctcgaaaaaaagaaagaaaaaaaaatgtaatgtgaaaatgcagccaagtttagtggtacaggctatgatcccacctacttatagggaagttaaggtatgatgattgaaaattcaagacctgtctggaataaagagggcttttagtccagtctcagccatttagtgaaatctgtctcaaaagaaaagtatttaaagggggtgggatatagctcaatagtgtttgcctatatgtatgcatgagtccctgtgattaggcccccaacccaaattaaaataatccaattttgattcttaaggcaagcagcatataagaccaaggactttcattttctacacatgactaagtgtttaatagcttccttcattaattattaagggtgattaagcgtttatgttcacagggaaaaagaagtactgccaagtgtttaaaatgctggattgctcaggaagtttggcaatgatgctaattttctgttgcacatgtgagaacatgggttgtgggagtttccagtatttcagaagaatctttttgccttctccattgctgtttctccccttcctcccccggtcctcctttagtacttcagtgttgtgagtatccatcacagctctcttctgtgtgttatttcacatgtcaaataactttgttttcctatttttgaacattctattcatgcataaatgccatgatattcttacttaggcttctctcttctctctctctctctctctctctctctctctctctctctctctgtgtgtgtgtgtgtgtgtgtgtgtgtgtgtgtgtgtgtgtgtgtaatcctagctttcctggaattcactatgtagacctgactggcctcaaactcatagagatccacctgcctctgcctcctggacttaaagttctggcgctaaataaaggtgtgctaccatgcctggcttctctctggtcttctgttattaccaagttctgagccagtctagggagaatggaggcagcaggtatagtttagggtcctttggccccagtaagttggaaccaatagtctgaatgactcaaaatatcccttccctgaaactaggtcagtttatttataaagaagtctgacccccaagatgatcaggtgtttgggggaagaagccaaaagcaatctttcaggaaggtgatagggaaggtcagagacttgtcctttattctaccttgacttcaaaaacacagttcttaggtgacaggagaatatatgcggtactctgtttaacattagcagggctaattctgctgtgttgagaactgtaataatactgctcagtactgggatgggctacctgcagtcactggccggcagagtcactatagtgtgcatctgaagatgaaagactagtaggaaagataagcaaggccttcctatctcagtgcctatccaaggaaatagagatatctgcaatttgttccagctatcaggtcaatccggcttcttccatctagcctgagaagtcatgcttctaaaacgtctgtgattactttgacaaacagcctaggagaggagataaagtctgatttcagccaacccagcttgcatttcagtttcttaacagaaactgcctgagaaaggactgctgcacggcacatcagcacatttccactctttcatctagaaaaaggagagaagattggctaattaatcctactcgacggttcacatttctattgccaagaggagcagttactcaccaacagacactagaaacacccacacgcagacagacatgtacagtcaggtccttgtcaggcattccgagcttgccattccactcacaggaagctctggttgaagtattcccaagcctcagaacaggcctccactcaagagcagaggcgttgttgttgttttaattttgtattttcttttatgagtatagatggtttgtctgcatgtatgtctgtgtaccacatgaccagatgagggtgtcatagcccctaaaaatggagttacatatagttgtgagccaccatgtgggtgctgggaatcaaatatgggtcctctgaaagagcagccagtgctctttttttttttgttttgtttttgtttttgtttttgtttttgtttttgttttgttttggttttttttttttttttttttcgagacagggtttctctgtatagccctggctgtcctggagctcacttcgtagaccaggctggcctcgaactcagaaatccgcctgcttctgcctcccgagtgctgggattaaaggcgtgcgccatcacgccgggctcagccagtgctcttaaccactggaccatatctctggctccaaacagcagagttttatatagttttatatgcaataaaattacaagcaaccatgatttacagatagatatatttacagcatttttttcttggatcatagaaaagatagaatacctaacgatagagggagagagaagaaagggaaagtcaagcgtagctgtgcatgcctgtaatcccagtattcagaggctgagagaacttcgaagaggaggccaagctgggtgatgtaatgaatctgaggccaccctgtgctacacagcaagacagacagatgagagagagagagagagagagagagagagggggggggggaggaggaggaagaggaagaggaagaggaagaaactaaatgaaatcaggctaaaagtaagcaaacattttaagagataatgtgaatggtttattcccatactggattgtttcagctagtgagcataatctatgttaaacattgctctgccccattgtttaattcaacacagtcattgcacatgttctatgttagtcatggttctaaagaaagagaacaaaacacaagaaaatttcctccttcttggagtttacctctcagtggggatagcttatttcgttgtcccaataagaaatggagattgggtgtcatccttgcacaggggccatgctaatcttctctgtatcgttccaattttagtatatgtgctgccgaagcaagagaggtggaacaacaatatgaactaaccactacccccggagctctagctgcatatgtatcagaggatggcctagtcggccatcattggaaagagaggccccttggtattgcaaactttatatgcctcagtacaggggaacaccagagccaagaagtgggagtgggtgggtaggggagtggggggggggagggtatgggggacttttgggatttgaaatgtaaatgaagaaaatacctaaataaataaataaaagaaacacacacacccacacacacacacaaagaaagaaagaaatagagattggaaagtcaggattgtctaaggtacaggattgtccagtggcagaatgtgtgctcatcatacacaaaagctctggtttgatccctggcagcagaaaagagagtgaagaatgaaaagtaagaagagaagaggaaaaccatacatagaaacagaaaaacagggtcaaatatataggacagaaaaaacactgagggatctttgagttttgcttcagttgctgtaataacacagtgacttggggaggaaacagcttatttcatttaaagctcattgtctatcactgagagaagctaaggcagaaactcaaggaggaaagctggagtcaggaactgaagcagaggccacggaagagtgctgcttactggtctactactctccatgtactgctcggtctgctttcttatacagcccaagcctagctgtgcaggggtagcgccacctacagtggtttgaactcatccaacatcaatcattaatcaagaaaatgagtccaaagaggtgctataggccagtctgatggaggcaattccccaactgagggtccctcttcccaaaagattctagtttgttccatattaacaaaaaccctatcagcacaggggaagaggagctagtggaaattagaccctgtctcaaaacaggctctttaggcttggcttcctcacatagtaagcagcaaaaacagcgcaaagagtaaaagtaggagctaccaggcctctcatgacccacacttggaaccagtcatgacatattgccacaatgccacattctagagatccaaatcaaatccagaggtcaaagcaagccataagcccagcccaggcaatgccccttgttaagagcaaggataccagaattgttggaagctatttttgtagaacctttataacacttcaatgaatatccacagccacttatgagacagtcaccatttcactccctattgtataagtaagggaaactcagactggattgactaaatagccccctgacgcaggcatcatatctgggagtggctcttcactgctgcagagttcccctttactttcaaagtagagggcaatggttagatggctagaacccagtgttccttcttctctgagagagataggaaagcaaagtactgaagagttcagatgctggagtgcaaatcactttggtttgtaattcagtgctggttttaattcattgtcaccatgacttgggctaattagcctcagtttcaccaccttaataatggggttgataatgtacagttaaaacaatggtgagataagaccctgcctggacacatgcagccagctcttttttctcatgggatctacattcattgactcagtcagaaagaaaggatgttttcaaataacacctgtactacacacatacagactacttacatagaatttacattctattagttataagacaatctagggatgccttaaagtatacaagcagatattcacaagtcagtagtatgccactttatatagaaacttcagtatctttgaatttgggaatctattgaggcacttgaaatgaatctactaccacacctaagaactttctactattgttaacttgagtgtcctaattatttgccttgaatcaagcagtgtacttcagcctcaagaccactgtgtcaagagttcctgtggcctactgacactctatggacactgcctcagtcagctttgcctctgaccccaattctgctgcagtgactactcccaaggaactctgtcacgaggttgaccccatgtctgctctttcgttgcactgcgtatccctgttgcagctatctactctctgtgctggagccctggtggccatccgtgtttacttacaccgcttcctttaccagtctctttcagctcggactggacaactggaagaggaaatggaagtttccaggttagctcatttgctgcatttgtcgtgctttgaaatagccaaaatgctccagcgtgaggaaccactaggtggcagggctgcttcactgcctgcctcatcgctttctttattcctttattgtctatacatcaactgcagcaaaaatacagtttctttaaaacgaatcagttgcttttaaatcaacttgcttactgctacgcaactgctgaaaaactaagaaaactcacatactttgctctgaatatccactgtgatgtcactaattcctttcggagctctcacagaggtcagattactgcagaagttttactgccttcggcttaaaaaggcgtgggaaaagcaaataaaccagtgcctgttgagcacacggccagagctgattgttttccctctagttgtcaacgcccagcaggacaaagatctttaggttaaggttcatggactattaggctgttgtttcattcataggattgtggccccatctctcctttcccagaaggtcgcttcggaggagatggaatttcagctgcttcctgagacagaagcaggtgcaggcacatccttccttcagttacgtccccacaggaatccaacccgtcaggtgggaactcttaacaaaatggactaggagggacagagaagggaggagatgtggagcgaaggccaagaatgctaataaagcccttgtcttacagcaccaaggacggagaactgctgtagacagttggcgggatgagacatacagctaggtgtggtagtgcacatttgcaattccattacctgggaggccaaagcaggaaggtcacgggttctagggcaaccagtgctacttagtgagactgcaaaaataaacagacaagtttttaacatatatatcatttagagttaaatgtaaaattaagatacaaatccttgggggctgtagctggaaggacagaagggagaggcaaactagcaaaaaggaaaagttaaagtcaacttaggtaacacagcacagtcgatagaaaatatggaaaaccaaaccagcaaggtataacattcataaacaaggaaacgttattttgaggcatgaaggtaataagaaaataaaactaagctaaaccacccaaccaaacaacaaccctgaaaacacaaagacctagtaatccttgtgtctacacaacagatggaggcactaggtaatagagtaagcggtactgtgtggtttcctaaccaccatcttgttgtaccttaagaatgggctcgggtgagagatcgcttggaagctaaagtcctcgctactcaagcctcacaacctgagttcaacccctggaataagcaactctacaaaatgatccccaggcctccaaacaagccagaacacgcacacaccacctccaccacctccaccatcacctccaccacctccaccatcacctccaccacctccaccaccacctccaccatcaccaccacctccaccaccacctccaccatcaccaccatcaccaccaccaccaccaccaccaccaccatcagagaatgacagaatgggtgaagggctagtaagatggttcatggggcagagtgcttgccaagcaagtctagtaacatgagttcaatccctgaacctacaaaaaaggggaaggagaaattgaaaggaaataaaacttgagaactgtggttcatgtaatttatgtcaaatagcccaaagagttgtttgtgagctttgaaacttggggctaagaacatagcagaacaggccaggacatgcctgggcaggcccgtcgtcacatgtcctgactggcctagtgcctccctatctcccgcccttctgacagtctgttgatgtttaaatggaccaatcatgtgaaaccgtgccaattcctccccagccccaccccttttctataaaagtccctagcttccaagccttggggtcgaaaccactgtctcctgcgtgagatacgttttgaaccggagctccgccattatggctccaccatgtggtcgacacctctgtctcctgtgggagatatgtgtcggcctggagctccgtcattaaactacctcatgcttttacaacaagatggttgtctgttcgtgattcctgggtgcgcgctgaatcgaaaattgagtgggggtttccccactaggttctttcaaaatccgacttctccctcttcctttctgataataataacacattatttaaagaataggctggtataaagtaacttttatttgcccaaagaattgttgtctccagacttactgcctccatctgttatcctaggtctaatcctggaagcttctagcctccgtacaatcttatctagatctagaatgttttcagcctctaagacttgctgctgaataaacttaccctttcttgttctttctgatctctgactggcaggttcaaatcagctgttctggctcaaactcctttccaagatgactgattcgaactaacttctctcagcttctcttgaattgctttgcttggcctcatactaactctggcaatctactcttctagctccttcttgttccctggttcacccagtcttaacctgtgtctatttgttctttcttcaacctgtccctgaaaaaaaaatctcctggtaaaactgcctcctcctttctctgtgctgctctcttaagtagcctctttttcctctcttcttgtgagagttgggcatatcctattctgtcaaatctttctctgattcatcactgtctgccactcagttaacatcaaatatgactgcttccttctaaaacatgactttactttcatcctttgggattaaaggtgtgtacgaaggatgtgtctgtattccagccaaagggattgaaactcagggctaagccacaccacaactacaaagttttcccagcaagtaacacactcttagggttcacagtctgaccaaatatcctggagcagagcatatatgagaaaccggactcaaggaaaagaaaagatcctagtgtaaaacagatctccaagttcctgggaacagcttcctttgagctttaaagttgatgctctgcatctagcatgagttatctagcatttaagcaggagagaggaatgtcgcagggagtaaaggctggctgccagctttggttacccgagttcctttgctgggacccacatggtgaaaggagagaatgagtccctgccgcttgtcccctgatctccacaggtatgacgtaacaagcttgcgtgtgcatgcacacacacgtgcacagacataacacatttaacacatacttgtttacttggagatgactttgacttactagaaccactactgtgagttacaaattagagactacaagttttcatacatatatgtaacattcaacataggcattttctactaaagatccactttatgtcaatattttcacagcatatatttgggttctctatgctacaaactaaagttatattaatctttctaataaactggagataaaatatgctgttggcttcattggtggcatttcggtacaaatttctcagcacttggacctatcagcagaatgtggttggtctacagcagcgaatatgttaggcctggccacacacttccttttttatcttcttttgaaaaccacatccagtctatcagtaatgactgctattctttctgaacatatcagaacttgacacctctcacgatacccaaccctaacattatagttcgagtatcatcgcctcctacttggacctcagaaatggtctagttactgctttcatacaggctccagagtggtagtttttgctgtttgctttttgggttgaaataaggttatcagatagttcaggttggcctcaaacttgtcatgtagctgaggatggccttgagcctctatctcccaagtgctaggattacaagcctgtaccatcaccatatactggagatgaattccagtttgcatacaaagcaaacactttgcaactaaactatactcccagtcccaaagtgctgaatttttagaatatatatatataatgcatgtgtgtatctaatgtatgtagaccaggagactgtatcaggccccttgaagccgtgagtgactgtgagccatccaatgtaggcactggaaactgatccctagatccataatagcagcaagtagaccttactactaagccagctttctatccccaggatagtgtgcttttaactgtaagccacggtgagaatttgtagactattgctcatcccatcttacacttgattccttcgttttcctcagccttacagcctaaggggcctcttagttaattcactgtgaacttgccctggaatactcttcttccagattgctaaacaacctgctctcttcctccagactctgctctgtgtccttaccaaagagacctttcctgtcctgctggtataacattggattattccctatatctccaccattccaaccctgatagtttttcttcataagatcctcaaagaacattattactgcatattatttattaattctgtctttttttaattagaatatatcgagaatataaggatatataaggatctctcccttgccctctactgctgtatacccagagcctaaaaaatatctgacatataataaatggtcaatatattgttgctaaattgacaggcccaacatacaactggtggaaccttattagacagtataaagacacacatttgatacacatgagatggcactaaatgatatccagagaatatctcttcagtattttaatccttcagtatgttacaaagatctctgttagtgctgagttgtctctatgacctggccacttatctccacaattagggagtgaggagctctagcttcacaacctattgaaagccttttataatcctaagataaaaatgaataagcaaatgaatacatttttagaaaaaataaacataaaagccttttacatagactaatatttgataattgaataatcttatttacattgattttttcactattttgtgtgtgtacacatgcccacacatgtcatagctccatcagcactggagatcagaggaccacctgtggaagttggttctctccccatgccatacaagcccagatcatcaggcttggtggctacgacccccacatgctgagccacttcaccagctactgcctcccaacaattctaggagggaaggatgattttgcagaagaagctgtaaatgaatctcccataagatccaaagcttcctccaccaagataaaattcacataaaacttgcagtcttattaaagtgtataattcagtgtctcttagtacatttacagtggtgtgtaacttatcatcactacctaactacagaactttcacatcttctgaaacattacccatcaccccaattccttctaaccctaagcaatcctgttttctgactctatatattgacctttcctagacactgaatatagatggaattgtaacctgtggttttctgtgtgtttgtgttctctccctccctccccccccccccccccccgtcattggggactggacctatggcctctcacatggtaagattaaaagggcactatcactgagctatatccccagcctatatgtggtcttttgcatctggcttctttcagttaacatggcatccaagtttgaccgtgttgtagcatgtacctgtacttcagtactttttatgaggtagcttatggtagagttcttacctagcacatgtaaaacactgggtttgcaatcaggcaccacaaaataaaagtttcaacagaactttttaaagactaaatattaacctgttgtgcaaataccacatggatttcaggttgtttctagttggaggctatatgcagtgtttgtgaacaacttgtttgaatgttttctcttctgagtataatatgcttgctggtagaataggtaatatggtggatctatgttacgcctctttcagaaaagctaaactgaattctaacgtggctgtcacattttgcatcgacagcagcaagatttcattgctccacatccttcctataagagatgatttttgcttttcaaacttgccatttgaatagttatcataaagttagtgttagtgtacatttccctaatgattggtgatagtgaccatgtacttcatgtacttatattggtctttcatgtaccttttccaaaagctctgatgcaagtcctttgtaaagcaggatagaaaggagaaattacaaggacctgagaagcaaaaggagccgctctctcaacagctgagaatcacagattccaaaacacttagcaactgcttgaggcctttctcctttctcatctcagaacctataattttctagaactctcatcagaaactccatttagtaaagggcatgtcctaacccctttgtacaaccctagtggcttccggttttattagagtgtaatcccatccaaggtacttctgaaacatcctataatctcatttatgaaaaataaagaaggaataaagctttcttttccatttgagatgtaatttcagagccactaagagttgttattctgaatttctaggcttaaaatctatgctaacactgtctttaataaagtttgctgttttgagagggctacactttcaggtgctttttttgttttgtttttttgttttttgtttaagacagccttggctgtcctggaactcattctgtagaccaggctggcctcaaactcagagactcaactgcccttgcctcccaagtgcggggattaaagatggtaagccccaccatctgccccacctcccaaacatttatttatggaggtgaggatctcacggtacacttgtggaagtcagggggcaacccatggagtttgttctctccttccacagtgtgggtcctggggatagaatgcagatggccaggcttgatggcagacaccttttacatgctgggccgtttgtcagaccccttttttattttttactaaactacaacgccgctttctacgatactggctgctcctaaactctttgatgcatccaaggcaaggatccggtttttacctttctcattgtccgtgctgacaaggacagtgtggctccatgcctcagctgctgctgccaccactgaaactttaaacaatttttattatttatttatttatttattggtgaggatgaggggagaggcagagagagagattgcaatgcagtgtcataatgcccttggagccagacttggctgtcagagcccctgaagttacaggtattgagagcggccagaggtgggtgggtgctgggtaccaaatttgaattctctggaaaagcaagccttaatcactgagccatctctccaccatcgctccccccccccccccaaaatccggctgtctctttctgttgagttctaagtttcctcttttaaaatgttacatttggggctggtgagacgtcttagagggtaaaggctcttgctacccatcctgattagctgagctggatcactggaacccacgtggtggaagagaagcaacttctgccaagttgtcctctgacctcaggtgtggcacacaagctccctccacacacacaggaaatacatgtaactaaaatataggaaatgtaacctttggcatatatagagaaacatgatctgaaaaccgcaggctaggctaggggctatactctagttacagcacagcttgccggtccctgcagaatccaagccgggtatggtggcgcacacctgtagtcctagcatcccggaggcagagacagcggatatctgtgatttccaggacagaacgatcgacaaaacgagcaggccagtcagggctacatagtgagactccaatctcaaaaagaaattccaagtaaagagtgttgtgcaagacgggaatgggggagaagaatctctttagcctcggtttctctggctttaagactggaatcaagtcccagtctcaccccagtgctcgacactgagggcagaggaagtagaacaaccgagcatccgctcgctaggagagcgccctccgcagtggttccctccgggcaggtgaccggcctaccggccgttcttcctcttccgggtcagagtgcacccaactgcgcacagctctccgcgcacactcccccgcctaccccggagcgtgggagcaccgtgccctccgaggcctgacttccgtttccgggctggcacctcggcttccggcggcgtgctcgcggtgcggagaccggaagggtctgtgcttgctgccggtaactggccgcggctgggagtggccgggtgggtgggacgcaggggaagacggcggtggcttcgtataggtcggtgctggggctgagcgtctggactctcgctgggcttcgcagagggtgggagtgagagagccactgcccttcggtccgaacagcccttctgctctccacactgtccgtaggagttgtgttcacagtggcgaacggtgacacggtggaaccgcgttcacctctgtggcctgttcttggttggcacagcattagggacaaggaagatgttagcttaagccacggcgcttttgaaaagctggtgggaggtgtgggccctccatcacggtaacaccactccagccccttcaacctccacaaacactcccacaggacgtctgtattactagcttcagacatttccaaggtgtccccagcatgcgcgtcattggatctcggcgtcaccacatagtaggctttcagatatttgtaattgtttagatagtggaagttgagttaatctttaataaattcactgcccacttgtctacatggcggaaagtagatacctcacccatacattaaaagttttgatcattagtccagaattgtgttgttctcgttaaaatcttctgtctttgggaaagagagatatatttagtttccagttcgaaactaggcaggagtaacttgcttcctggacccgcgagtgtgggaagcaagaatttttaactctgaaccactacagcctcacatcctgaagtgctaagctgaaagagcaacagaggagcttctctattcatgttagcaaatgtaagatggtgcttaccaacacagatgagcctaagccaagcactgcatgcagtggaaacactcttgtcttttctcctgatgagcctgcatattgcttgtttagtcacgtttcactgcctgtaatccgtgcccttatttatactacagttttaactcgataggtacattgaaatacaaaaagagatggcattgtttccctttttcttccctgtattgcctctagagactgttggtccttttagaaacatctccatcatgtcttgtgacactcaagaagctaccagagagtgcctgggtatgaaccttgatggcaacaaagagcctgtgtcgctggtagaaagcggcgtcagaagtgagtcggagcatctccaagtcactattggagccactgtacccactggctttgaacaaacggctgcgggggaagtgagagagaaactgaagtcggcctgcagaatcagcaaagaccgcggaaagatctattttgatattgcagtggaaagtctggctcaggtttgaacaaaacagtatttaaattagtcttggttattttatgattatttttctggtttatagacacccctcccccccttgggaatcctttactctgttctgcttaaagtagctgcattttctgttgtgtactaatttatgaaattgactagtttactatgttgctgtttataatgtctttgtaatgtatattcagtttagtacattttagcgttagtttaatatggtttagaagtgatcgtagcatttcctgatgatttattcaccgaaatgaaatacctaccaatgtctatgacacgtaaatttactttagcaaaagtttgggtacacacaaaagctgaggtttccttttcatccttgtcaaagacattgtttttaaaagatttttattattttatgtgcattggcatttgcctgcatatatgtctgtgtgagggaatcagagcccctggaactagagtctaaactgaacctgggtctttctgaaagaatagtcagtgcccctaaccactgagccatttctacagccccttcaaagacattcttgatcaaaagtacatgattacaggtgagaagcagaggttagcaaactgccattgcgttgaaacaaaagctaccagatttctttactatacaagtagcatagggtatggcttgttaactgttgtcttgctagtgtatcccaagctggaagcatataacatgcaatagacactcacaaaatacttgtggtttttgtaagtaagcaagcattttcttgatgccttcagtagttttttgaagattgggcactattgtcatcagtcattaggtttaagaagaaaagtagtttgtctgcagtaattcagctatcaccgaactagagcttaaactgtatgtggtttcttttttggaggggagagataggaggttgagacaagagtctgatgtagccaagttagcctaaatttcactatatagctgagcgtgctgcccctcccaagagctgggagtgtaggcatttgctggtagatccatgctctttgcccctgccatatgcagccaaaagacatgagagaagaacaaggataaagcctcactgtgttaccctccttccctttcccagaccagagttactgcctatatgacatttcggactatatactttggtctcagtgaccctttctatggggaagagtggaaattgatgggtaaccaaagagatggaacactcgggatgggaaaattttgtctttatatttctcccctctttaaaccaatgttgttgcctgtatgacattatcacagtggcccttctcctgggaaaagcaggaactgatgggtaaccaaagaaatggactacatgggatgggaaaaatgttaactataaaatacaggcaggaggtgctactttaaacctattttacttagttagacatggtagctttctcctggaatgtcagtactggggacactgagtcaggggaattgtgagttggaggcaacccagagcaacatagcaagaccgtatctcaaaaagataaaaatgaaccaattttgtacttcttttcttttaaatatttaactgtagatagcttctgttatttacaagtatgttcagaaatttgtttctaacgtttgtttctctcccctaggttcattgtctgagatcagttgataacttgtttgtggttgttcaggagtttaaagattaccagttcaaagatacgaaggtgagctattccaagcatggtctttcccagagagcttgttctctgcagtgtactacctgcttgtcacactgtcacttagccttgctattggtttatttctttacagtgttgagaatataacaaaaaccaagcatgtgattacagtaagccttttcacgaaaatccagaaatctctttagagcccatctgtactggctagttttgtgtcaacttgacacagctggagttatcacagagaaaggagcttcagttgaggaaatgcctccatgagatacaactgtgaggcattttctcaattagtgatcaagggggaaaggccccttgtgggtgggaccatctctgggctggtattcttgtttctataagagagcaggctgagcaagccaggggaagcaagccagtaaagaacattccttcctggcctctgtatcagctcctgcttcctgacctgtttgagttccagtcctgacttcctttggtgatgagcagcaatgtggaagagtaagctgaataaaccctttcctccccaacttgcttcttggtcatgatgtttgtgtaggaaaccctgactaagacaccatcccagaagctgcttttaaaagtcacttgttaaagaaaaaccctaagttatagggaaaaagtcttagattagctcgacagatagtacagatggtttgcaactagaattgcttccaacatgtgaacaaaagacagagaacacaaatagcattccctccccagtttgcttttgtcctgttttagcttcatgttttgaaatgaagccaaagcaacatttaataccccttcagttgttaggacaacagctttgtctccagcctgtacttatcatctgagtcctaaatattcagctgctgtttaatctgaaggttgcaaacagacctcagtaacactttagggttttttccctatatctctttctggccaagtttccagaatcaagtgcttaaaacttttcctgtcaatattatattaatgtctaatttagagctaatctttcttaaaagaactgtggtatgctgtctaattctctgttttttattaattttccagattattttggaaagccaaagtatccccaaatcagtaaaactaatctgggatcaggggcttaatgataaagcactttcttcattagatcctagtaaagaaaattaacagtaactaaaaggctaacagaacccatagcttactaaaaattcaaacagctctaaaagaatatccattgaaaatagctaaaaattgtattgcctataaaaataacttcagcattagaaacattagtattataatccttcatactcattttttttcttccttagtgatgtcctggtggtttgaacccttgacttttacatcctcagtgagcactcccactgaactacatcccctgcttaactctgaagatttctgatagttactaccaactgaatgataccaaaaacagttttagaggcagtcttttgaaaagttatactgctaagtatttggaaattttgaaggtcagttttatgcatgagtaaatgttattgggcatcctatcttaaatcctcttccacttaaattaccagacattattaaattcttggatttttgtcatcttaatttttttgttgttgtttttcttctgtttttttgttactggatttctctgggtagctccccggctgccctggaacttgctatgtaaaccaggctgtcattgaactcacagagctctgcctgtctctgcctcctgagtgcttcgattaaaggtgtgtgtagcccctcccaccctagcttatcttaaaatttgtataattgaggcagttctgatctctaataagaggtgaatttgatgtactagaagtctacatcagttaatcgttcaaagttgccttagaaatcactgtaaagcaggttcgtgaaggcagaggaaggggatcactgttggtcagatgccctgcacaagctgggggatctgaggtcagtccttagcatctgcataaaagctaagggggacagtgtaagatgtgacttcgtcacgaagggaatagaggaggcaacctggctgaatgagttccaggttgagtgagaggtcttgtctctttgttttgttgttgttgtttgtttaagacatgaattctctgtgtagccttggctgtcctatggactgggctgttctcaaaatcaaatctatgcctgcctttgagtgctgggattaaaggcaggtgccactactatcaaccagaccaaattcctggatcaaaaagtgagtccagaccctcagtggtggctcatacctttgatcccagcactgggaggcagaagcaggaagatctcttgagttagaggctagcctgggctacagagtaagtttagaacaagcagcactacatagagaaactcttgtggccccccccccccccccaccaaaaaaaattgagatgcaaagcaatcagggtaagacactaactttgacctctggctaccacacttgcacatgcatttatacaaatgtgtacacagccgggcggtagtggtacacgcctttaatcccaacacttgggaggcagaggcaggtggatttctgagtttgaggccagcctggtctacagagtgagttccaggacagccaaagctacacagagaaaccctgtctcgaaaaaaccaaaaaaaaaaaaaaaacccaaccaaacaaaaatgcacaaatgtgtacacagcaaaatgcacatgtaccacacacccacacaacatttttgatataaatttcaagtctatacaaaggaaatttctgtcttgactatgaaaaattattaagccctttagattatgagtgtaaattgcacacactcccccagtgaactctcattactacttttttttttaaagtatgcacatgtataacacaaataaaatttaattttgattcttattaaattaacatataaaataaagggtaaagttggttggtcttgtgttttcatttgtttggtttttgctgtgttttagagaggggttttcagggtggtttcctgtttgtttggtcttagttttgtcatatttctgtcgtgcattctttttcttttaaacttctctttatataacgattttttcatgcactgtgttttctcttttggagctttaagggtttttttgtttgagaagaatctcactatgtagaccctatacagacgtgctgtcgtagaattcactgtgtagaataaactggcctcaaattcacggaaatccacctggttggtgagaaaacttgagggatcttttcctatcctccccgacccagcactgggatggtctgaggagcaaaccacctctcctgctttttcagatgcgtgctgaggaattgaacttaggtcctcgtactagtgcaacagtagtggtaccaactcagcatctgcctaactccctgcatttatttatttgtttagtttacgttttctttaaactctgtaaactccatctcctggtgactcagcgcatttcatttctgcttctaagtctgctgtgaggtcttatttaccaggcattttcttatatttttgatgtcatcatcttttgtttgtttgtttgttttgcctctaaatcatactgtttaacagagttctatggccggttttctggggcgagtgttctttcctgcaggtgtttccttcccctgtattttttttgtttattttgtaagttctgtgttgataaaggtttgaactttggaattttgggatgaggcagtttctcttaggctcctgagggtgaggccatgaggaagagctctccctggaatgactggggataaacaggccttttcctcctcactttgtcctatttttattgttttattgaagtataatttttgctccaccaagtgaattgttataatctttccttcctccctggcctcgggcatcagacttcagagtgagtcatcaaggaaagcacactaacttctgccatgttaatgaactatagagacaaaaggtattttaaaagtgattttgtttattgtatattttatgtatttacatttcaaatgttataccctttcctggtttcccttctggaaccccccctatctcattctcccttctcctggttctatgagggtgctccccctcccacccatccccactcccacctcaccgccctggcattcccctacactggggaatcaagccttcacagaaccaagggcctctcctcctattgatgccagacaaggccatcctctgctacagaagcagctggagccatggctccctccatgtgtactctttggttggtggtttagtccctgggagctctggggggtctggttggttgatattgttgttcttcctatggggctgcaaaccccttcagctccttcaaacctttctctagctccgccattggggaccccgtgctcagtccaatggttggctgagagcatccacctctgtacttgtcaggctctggcagcacctctcaggagacagctatagcaggctcctgtcagcaagcaattcttggcatccgcaatagtgtctggatttggtgactgtatatgggatggatccccaggtggggcagtctctggatggcctttccttcagtttctgctccacagtttgtccctttagacaggagcccttctgggttaagaatttggagatgagttagtggccccatctgccaacagggggccttgcctaacctctgaatatggtctctacaggttctccctcccctttgttggacatttcagctaatctcatccctgttgggttctgggagcctcttgcttttctggcacctgggatgtgctggtggctgcccctagttccccatcttaaaaagtgaatttatctagcatgctaagtgctagattagagggtaaaatgtggctgaagtgactgggaaactgagtatttaatttcctccaggtttgttttgttttgaaacagagtctcactacatccacacctggcctggaacttgttttgtacaccagccagccctgcctcaagctcacagagacccatgtgtctctgttgggaaggaaaggtgtgcatcaccacacctggcttctccatctttaagtcatttaacgtctgtactgtagatgtttatatagattgtataactctgtttggctagagcttgctctgtagatagcagtccttcgtacttcgcatttaaatatttaaccacaccatccagtaactgtgtctttgttgtttactcttggagtagtagtagttgaatttaggaccccgtgcactgtatgtaccactgagctctatccctggccctcttactttttattttgagatatggtgctaatgtgttatctcagttggctctgaacccactctgtagctcaggaaggcctgaactgcaactttgcctcgggttccttagaaactgggactataagcccgtgccaataaacctagcctgacagctatatattaaccaccctttatgtgcctctgctattgtaggtgtatggtctgtagcaaaggtcaaggtagttaaggtcttttcaccatggacttagaggagtggccttgccagtaagcaagtgcatgagcctaggaactgtgggccatacttagtactgtaaagaaagtccaagtgaaggggagaacagcataggggagctcccccacgtttacttcttaaaaagataatcatgggagccaggggcgacggcgcacgcctttaatcccaacgttcaggaggcagaggcaggtggatcgctgtgagttctaggccagcctagtctaggacatttgaggctataaagaagagatcctgtcttaaacaaaacaaaacaaaaaaattaatcatactgtttaaaatctagacagatgatatttttaagcttcttatagtttttgcccaaattcagaagatccgaaaggaagtcatttatagacatgttgtcttactttctgtctgctgccttttattcacctgcttccccaatgctgtgcatctgatctgccctctgctccattcttctttagtagcatactgtttatatatcctcaccattgaaactggaatttccttcattgcaggtattatcttgtttatcctttggtctgtactctcccaccatccccatcataaggaccagagttgtctacaaggaaagtaggcacttatttgttcagttacaatggtgagaaacaaaaggctttcattctccatcatttgcaggaagaagttctaagagactttgaagaactggctggaaaactcccatggtcagaccctttaaaagtctggcaaattaacaccactttcaagaagaagaaagcaaagcgcagaaaggcaaatcagagtgcaggtaaagagaaggctgactgtggacaaggagacaaagcagatgagaaagatggtaagaaaaagcatgccagcagcacttcagattcacatatcttggactattatgaaaatccagccatcaaagaagagatatcaaccttagtaggtgatgtcttgtcgtcttgcaaagatgaaactggtcaaagcttaagagaagaaactgaaccacaggtacagaagtttagagtcacctgcaacagagcaggagagaaacattgctttacctccaatgaggctgcgagagattttgggggtgctattcaagagtactttaagtggaaggctgatatgaccaactttgatgtagaggtgggtattagcttttattgatgatgaaaaagatctgtaatgtggctggggagatgggtcagtgggtaaagtatttgctgagcaagcttgagtacttgagttcagattcctagaatccacataaaagccagagtaaatgtatgaatgttaatcctagcactgatagttagagacaagtagtgtcctggagcagacaagctgaaacggcaagacccaggttcagtgagagactgtttcaaaaataaagtagaatggtagaaagacaatgtaaacttctgtcttttgtacagtcacccacaaaagaaaaaaaaggttctcatacatttgtaaaatttccagacagctagcacaagggccattgaacagtggccgtaaagctagaaggatgttaggaatagcatgacttgtggagatagatggataggtattgattgaaatttttactcagtaactctctagacttggacaagattgtctctttgagcctctgtttcaaatggagccaataatagtgtgtacctttaaggtctataccctggagggcaaatggaatggtttcaagtgtttggtatagtttgttggtatatgataagtactcaatggatagattgtcagaactcaagtagtggtggcacacgtctttaatcctagcactcagaggcagaggatctgttgtgttttcaaggcaagtctggcttacatagtgagttccagaacagccagggctatgtagagaccttgtcttgcaaaaccctaaggtgtgctctgtctctgtgttgtgtgtctctgaccttggcattgctatgtccggcagaagaaagatgagtcttcccccccccccttttttttttattccaaatttaggtgctggactcatacctacagccttgcacatatggacaagcaatgtatttctaaactatatcccagtcttcttatttctttctttcttttttttttaaaggtttatttattatttatttattatatgtaagtacactgtagctgtcttcagacactccagaagagggcgtcagatcttgttacagatggttgtgagccaccatgtggttgctgggatttgaactctggaccttcggaagagcagtcgggtgctcttacccactgagccatctcaccagccccagtcttcttatttctaatctagtatttttctacattatatggatttctagattgtaacttaacctaaaataaacttacttctaccttagttggaaattctgctactaaacaataatagaatatagttttcagaaccttctatcagggttttagagctaatcttcatctagagccagctttgttctttttaaagtcagctaggttcttaaaaccaaatgcctcctgttagcttgagtatccttgtgactactgggtgacttttgttgataatggtaattggagttctttaaatttctgatggtttatgtaggtccttagcagttgacatttttaccaagaagtcaatttttgtttcatttgggatactcaagcctggggcatatcactctctttgtaactttttttttttttttaatgtcagacaagaacaattctccattctatattttcttacacagctgtaagaacaaagaggctaacaaaggccatgtccagaagtctccaaggtagcacagaagacaaatcctgtatgaactggtgtctctgtgtcccaggctcagagggcttcctaggaaatgaggccatgtgaataagatatgtaggacagggccttgcatgttagagtgttagctctagacctctgcctttggtaaggccatgatgaggacattttagggggaatactggggaacattttatcttcttagaatgtttgtgagttaggaaaactaggacaaaggtagtcataatcagacattgttataaaactaccaggagctgggcgtggtggtgcacgcctgtgatcccagcacttgggaggcagaggcaggcagatttctgagtttgaggtcaacctggtctacagagtgagttccaggacagccaaggctacacagaaaaaccctgtctcaaaaaaaaaaaaaaaaaaaaaaaaaaaaaaaaaaagaaagaaagaaagacaaactactaggaaaacaaaataaaagcaaacatgacgtggtgtcagctttggataaagggtatgttttgagaggccaccgttaaagtgtttgaagtgttcttcaaaaacacgtagtaatttaaaaaatatatgtagaccaaatgtggtggcacatgccttggatcccagactcaggagacagagactgtcagatctctaattttaaggccagcctggtctccatagtgacttccatgccagccaaagggcacagtgaaacacacacacacacccaggcagtggttgtacacacctttaatcccagcatttgggagacagaggcagatgaatctctgagttgaggccagcctggtctatagagtgagttccaagacagccaaagttacacagagaagcctgtattgagaaaataaaaggtggtagaaaaaaaaaaaacccaaaacatacatacatattttaaatctataccatcaaaatatgttcatataataaaaactgggagataacttattaatagcctgtgtgtggggggagtaaaaagaataaaatgttttaaaattaaatgaaaatagtacatatactatttcatttttgttaactccaaaaactgatacaactaacttataataatagtggttagattaatgatcacccaggaaagagacaaaagagaactttgtaaagggtactgagtataggtcagagctcactgaaatgtatatgcagaaggcttacacctctgggctcactaggtaggcagatttaccactaaggttgctgacctgagttcagttcctaggatgcatggtagaagttgtcctctgatccccaaacccaatccatacacaaacacaaataaatacgcaaataactgaattttatgtactgtatagtaaacctgtaaagtataattcaatcagaaagtttgtataggctggcaagatagcttagcagttaaaagaattgtctgctctttcagaggatacaagtttaattcccagcacccatacggtaggtagctgtaactctagttccaagggatcacacacctctttctagcttccatgggcaccaagtgtgcatgtggtgcacagatatacattcaggcaaaacatttgtgcacatagaataaaaatttaaaatgttctgaaaagaaagttctctgtgttgtggctgttatgtatgtataagccatgcttggcttttacttgggttccagggataaactcagatcttcatacttgccaagcaagtactcttcccattggctcacctcagacctagccctggttttgttgtttttatcttaattcaaaaagtcttaataaggaagacatgtatctctttcttgtgatcacagcatttatgaggcagaggcaagaggattttgagtttcagtccagctagcctatctaagaattcaagccaattttggcttcaaggctctgtttattttactcttttaaatttatttatttatttattttgttgttgtttgtttgagacagtctttctatctagtcctggctgccctggaactcactgtgtagacctggttggccttgaacttacagagatccgcctgcctctgccttctaagtgctgggattagttagagcacttgggaggtagtaccacagccagataaggccctggattgtttttaagggtcttgttagtaggtacagttcgaagactgttgactttctcgtttgtctctaatttgatgtaggttctcctgaacatccatgataatgaagtcattgttgctattgcactgacagaagagagtctccatcgcagaaatattacacattttggacctacaactcttaggtcaactcttgcctatgggatgctcaggtaacagaaggggattttgctgtccatattgtaatgaacactttgctctgaattaaatcactcattttctaaaaaaaaacaaaacaaaaactcccaaaaccattttcttagttagaattacaaagtacctattttctcttcagtatttactgttgtcagtttttgatgcagaaaacaccacgtggatggtttattagtattcttggttatacatgtgagagtggtgttgtgtgtcttcagcgaggagctgcttctgtcgagagaggctgtgctgctttaggcaatagagtgaagcagaggagatccttgtgatgtgtgagtgagtacagaccttgtctgttgagtgacagtgctggcatgcagcttggtagcctgagtgctgggatcatggtacatatcaccacaccccatttactcatagttttaaatgttacactggctgtaacctagggatcgtgttgggactttgacaagtgcaagacaagcagcctgcctctgttgtcagtcttacgttcttggtgttttctttctcaaataagtctttttcccccctacacttgagatttcagtactgcaaaatgggcttgacatgggatgccaaagattattcatgtgctcaacttggcagcacatacactcaactaaagcaatatagagaagattagtatggcccctgcataaagatgacagacagatttgtgaagtgttctatatgaaaagaaaaagaaaaagaagaaaaggtttactcatgctggagagatggctcagagctttaagaatgtctgctgctcttgcagaggacctaagtttggttcctaacattcaggttggtagataacaacaacctgcaacttcagctccaggggattcaacacctgtcttctgtaggcaccagcacatacatactttaaaaatcccacccacacatatgcatacttaaaaaaaaaaacgtggtgactgactttagggctagagagatggctcaacagttaatgttgatgctggttttccatatgaccagagctcagttctagacttccatgcctggcagcttacaacagtctttaattccagctccatactctcttccaatatcctcttctggtctttgggtacacacacagaggtactaacacacatgtataaataaaatgtgaaaatatttattaaaaaattttgttcataaggattaaatgcagaaacatagtcagattatcttattctgtacagttcctggcatgatctagtgagttacataattacattttcttccttttcaatttttgcttcctcttttgtcatggtcacagttcctcacaactggaacacattaagttagtaacagaaaacttaagagaaacactcctaagcttctttcactaaacagatatttactatctgcctccaaccatgattatagaaaccagcatacagagttgagtgctggtattaaaaactaaatagaataaaaaagtaatgattgggctgaggagacagcctggtgcactctccgcacaagcctaaccccagcctcacagcatcgctattgtcaataatcctagcattgaggaggctgagacaggaggataccccaggctttctggccagccactctaactgaatttgtgagctctaggttgtgaggtaaagagcaattgagaaaggtgcccagctgagtgcagtggcacatacctttaatctcagcacttaggaggctgaggcagatagatttctgtgaactcaaggccagcttgggcttggcctacatagttccaggacagccagggctctgtagagaccctctctcaaaaaaaccaaaacaagaggcaagcagggtggtggattgggatgccagatcttgatttctatttttggctttcatgtgcatgtggcaaacacaagtgtacagacacatgaagtgataattatgctgaggattgcggtggttggagagatgagcaaagattataccagatccacaaaaaacccttgggcgattctcaagaaaggcagaaactacagggctagacagatggctgttccagagaacctgggttcaattcctagcactgacatggtggctcataatggttaataacttgcctcaaggggtcagatgccctctttttgatttgacaggcagtgctcacatgtgatacagatatacatgacagcaatatatccatagacataaaggctaaaaattaagaggtgcagaaactagatagtagaaaatgcaaaggactgctttcctgtcttctaaaagcttgtgtgttctggcttagctcgcctgtgcacttgactgcctgtcctccagttgcacatgactggctcaaacgacccagggttacttgctctttattccacattcctaagaggatttgagtgacataatttgatcaagtgcccaattctggcccattaacaatgactggcattacaggcttgcccaagaatccgtcttatgagggagatcattaacatgcatgatgcaaggtctcaaacagaatagaaaaatcagataaaacttagtaacctgaggactggtaagtaacatttaaagctagtcacatgtagtcttgactccttattttgtgtcctaggaaaaatgtttctttggatcattttgtctgttaaatggtaatagggttgtttaaagaatttcaagtgtataaagttaaagcagttattttatgttaaggactgtatctccatagttaaatccaaaatgaaaggagactgaatgtctggttgtcagcaaatgcccactaaaaatctccctgcctcagcttcctgagtgctaggataacaaatcagtatctctcgctctctcccctaccaccagaagcattgtacgcataggcgagggctgctactgagtgtcaaccccaggctgactttcaaaccataaattgctgatccttcacgctggtgtgcagatcctatgccagtagtagatcccagtcttagtttttggttggttttcacatgtgctggattgttttctccctccaggctctgtgaacctaagcctactgatgtaatagtggacccaatgtgtggaacaggggcaataccaatagaggtaataacagctttttatttttacataagcaagtgatctattcaaaatggtgggcaaattggatccaatgagaaaaaccccaaaagtttgaaaaaacttctcatagtcagggtaaaagttctgttaaagcattgtaagcattgatttcacacagccaagtaccgtgtggttagatggtgaaagctgaagtggtagagaagcgagctgagaacggcaaactgataagcctttttccctgtaatgaatggacgaggcactaggttgaacagcagaggataactgagggggtcataaacgtccacataattagagcttcctggagtgaataagtgggaaggagaaaccacagcattgcagctcagtgccagggcatctgcatgcaaaacaggtgttctgggcttgatctccagcactgcaaaacaaacccataagaatacctaaattgccgggcgtggtggcgcacacccttaatctcagcactcaggaggcagaggcaggcggatttctgagttcgaggccagcctggtctacaaagtgagttccaggacagccagggctatacagaggaaaccctgtctcggaaaaaaaaaaagaatacctataagtattctttatgtttgttttgagatgggggtcttattatgtagccctggctgtcctcaaactcacagggattcacccatctcctctagggcacaaactacctggccgtttgaccttttttttaaaaaaaaaacgtattttaggaaatctgacaaggctacatacccagtgaccatcaataattttcagaattgctacaacactcaaaaaactacagaaggtactaggtggtggtggtggcatatacatttatcccagtactcaagaggcagaggcaggcagatctcttgtgagttccaggacagtcagagctgcacagagaaagccagtcacaaaaacaaaaacaaaacaaaacattacagaaggcaaagtaagaaatgggaagatgttttctttctttcttttttttaatccttttgaggcaaggtcttggtatgtagcacaggctcaccttgaattcatggtaccacaggttgtgttgagcgggcagaaattggacagatgagcaagcccaaagcaacccacaaagggaaaaataatctagtataattaggaaatctctggtctgactttgattgggagttaaaatccaagaggaaaatgcacctagtttgaatgttccactggtggtggctagtgagtgactacttcttgagatctgaacaggagctgaattattatagtcaagaattctggaaaccaaactgtagttctccatcattaaaccatgacttatctgcgaaatggcaggtaaactgaccatgatgaagaaacacacaatcaaagtagacatcagaataaaaggggtggggtgggaaaaccagattaagccatttccacgtaaaagtaggcatgagagagagtacctacgtggaaacttcagctgagtcatgatggaaactgaagggtctgtgtacagatgtgcccattaaattatctaatacctgtcctagaagacactgagatttagaagtactgtaaatgtagcccaaggtaggaaatccatcctggattaaacattaaaataataattaaaaaaaataaaaaggttggcaagcacagatcacacctgtgagttcttcctgtatccctgcacacccagtttatggcatacttgaacattcctcttgtttgctgtcattatagaataatagaccagaatgtcatcatcctaaagggtctgggcaaaatagttatgaagtgctgtattcatgcatgcatgtctttgtggcagaaacagtaccatagtatgtcactttgtttcacaaatatgtcactgcttggcatttatatgctgctgacattttttacttaactacaaaatcttttcagaaatgtggttatcttttaaaagctaaactcacaatccaagacagcataggtctggttagttaggtaaatttttaaaaatcatgttaattaagagaatgcagtcccttatatgtgccagccattgccgggtagaaagaaaatactagacctatctggaaggaattgctggattacttaggcagaggtgatagacatagtttcaaatgggctaagtcagcaacagaggtgtgcaaagtgcttctagcgctgacattgatgtcatagtggatgacattggagccacatttctagtgggtgaaagttcagtaggcagaagaacagggaagacatttctggcaaggaaatgaatggcacggattgccatgttactgagagttggccatagtgacttttcccttttctcttgtggcatgtttaaccaacactcctgtctcatagggggctactgagtggtctcactgttaccatattgctggggacaataacccactggcagtgaacagagcagcaaataacatctcatctctattgactaagagccagattaaagatgggtaagtttaacttcaatgattgcattgcatcttttcaagtctctctccctactgacttggaattattattcacccccagtgctttgtggtatcattatagccaaatgaacagtatgagaagtcacatctaatttactgaaaaacatttgtaattaatttaactaccatttccatactttattggaatgttatttctccttttttgttcattattttttgtcttttcccaaaacggtacagtatggtataggttttgttatagtataggttttgttatgtagaaaaggcacgcacgtgcccttattccagaggcagatggatctgagttcaaggccagcctggtctacagagtgagttccaggacagccagaactacacagagaaaccctgccttgaaaaaccaaattaattatttagaacaatatgagttgaaagaagcatgaaagtcattaccataacttttaaactaccagttatctctattagtagccatggcctgtttaaatcctccaattgctttgcttctgaaggctggtggattaggtttctgtttatatctgtatatgtgtgggggcctgagagtgccatggagctgtgtcatggtgtggaagtcagaggataactagtgagagttgggtctcttcttcctgtgaatcaaattccttttgtctggcttagggcagacacctttgccagctgggtcatttctctggccttttagacacttttttacatgtaagctcattttccctggtattttcttaaccatacatcctttgaaaaccagtcttaaccatttaaaaaacttgtatttcagttatggacatatttcttcctatgttactttaacatttctttttagaaaaacaacctttagaaattcagactgcagaatgttttttattgtatttatttgtgtgtggacatgagggtagaagattgaagtccaactgaaggatttaggtctctccttgtaccacatggtccctgaggatcaagctcaggtcatgagacttaatggccagtaccattatttgctgagccatctcattagcttgggaaaatatattgaaatatcttacctttgtctccacagaaaaacaacctggggtttgcccattgatgctgttcagtgggatatctgcaacctcccactgagaactgcttctgtggatattattgtaacagatatgccatttggaaaaaggtagaaattggattctttttaaataaataccatgagtttaccttttattgtactgtcttctcagtcagaaaaacatgccataattcatttcactcactgtaccattacatggtcctattccacattgtaggctgagaagcacttgcttcttggacagatttctactcgtggtttgtcttcaataagctaagttgcagttgtttaaaaaaaaagtgttctgatagaaaactatacactggactaactctataacactggactaacagtttccttcattggcatagaatagaggctctggcctgtaaaagatgactgcttcacacctaagatttgttcttgtctcatgtaagaaactacctatttaccttttgcaatagattaaacttgaccttcttttataggatgggatccaagaagagaaattggaatctctatccagcttgccttcgggaaatgagccgtgtctgtagaccagggacaggcagagctgtactgcttactcaggacaagaaatgttttaccaaggtactatacacgagagttaaatcactcacctccctgtttgtacacaatacatttatttggtgccctcaacagaagaggatgttggatggaccccctagaactggagttatagttgtaagccacaatgtatcagaaactgaacccagatcctctctaaaaacagcaagtgattttctgagtcaactttccaacccaccacccatagcatttaagtgggaagattttaggttgttttagaatcagactggtagcctaatgacttatgttttttgtgtgtgccaggccttatctggaatgggacatgtgtggcgaaaggtccatgtagtctgggtgaacatcgggggccttcatgctgcagtttatcttctaaagcgcactgctcaagcctttgttcatccttcagatcaagatgaaggaagagaccctccttggtaaagaaaagagtgaagacaacttattaatatttgtagttcctaacactggaaatatcagcataaagaacttgctttgggagaaaaatagcagaaaagtaacttacagtacaggttacactgcttgaccactccagaatgcttgatttctagcaaggtgattgtaatggtatttcttaagaagcctacactgcttggcttctaagtgtcagaacactttaggccatattctattgcttgtgcaacctactgttttatggtctaaattctttgtatcatctcagaagcagaagcatcccttaagatctacagttttatcatctgccttaaaataaatatacaacctaaacagagcaaagatgcttgtgtgactattataatattactaagtagtagaaacaccagtagatgtatggaaccaacaagcctaattaaagaaatttctcttttagtgtatggaagcgttattttccaaagccctccccacccccaaagtgcctgtcagtcttagggggtagagggagctaatgtatctttaaatgaaaatgtaaactgtacactgtactgcttactcaggacaaagatttaccaaggtacctcaggagagttaaaatcacccacctccctgtttgtatacaatatgtaggtctggggccctcaacagaaaagggtgttggatagacctcctgacttgggagccctgttattcctgcctagctggttgttctgttttcgagttgtactgatttttcctcagatagtcttgtgggactatcattatataagtaacctcattacttatcagttccttaacagtgcctcctaaaagtaatccttgtttgagctttatggaaagttatttatttaggaaagtctggcttctttcagcttagattttcagtgtgatgtttctattagaataaagggcacagacaatccttcctttgagaacagaatccacattggcaccatagtcagtggctttttggaattagtaactggagaatgaactggtattatgaaatttttaaaggttttataccctagataggcaattttgcaatcacaaaataatacattattgattgaatataaacttaaaattccatccttgatcaaaggaaccacttttacctcaaaccaaggtgatcacagaaccaagatgtacaactatgattgtttcatcaccatttaccaagttcctgacataatctttgccagtaagcatttaatatttactgaacaaatgaactactttttatgctaagttctcaagttaatacaccaggtttgtacttggttcaccatagctttaattctattaagtatatttaaaaaattgacttaaaacactacaaatatagtggacactgttagcttcatctctggctggtaaattttgctaacctggttacgtgaataggaaataagctatgaagtttctcctctagacaaggtttttgtcacatagccctggctggcctctgcctcccaagtgttgggaactaaagataagcaataccatgccaggtggaaggcttcttactgtgtttgtgtgaaattatgtgtaccagtgcaggtgcctgtggaggctagaagctggtgttaattggcagtctatgagctatctggtgtgggtgatgggatgagaagtcaagtcctcctctagagcagcctgggatccattgccacctttcacttagtttgtttggatggtttttgcatcaggataaagttcttgctcatcagttgtgaagatgttagccacttaagacaccagtttcagcccaagttcttcctgcctgccttctgtgacccacgtaaagcaatacatgcttttcaagaaagacctctcagtcctgtgtgctcagtaccagttttctaggctctttaggagccattcagtgttcactatgtacatctttctagagaagccatttctcaaaatttaaaactttctaatcttacctattcctaaaattttgaaacactagcataaatcttatttgagatttttttgggggtgatggtggtcctattttcaggactagatcaggatgtagctcagtgagaacactaacctaggagtttgaaactaaatttctgggttaaaaggcccagatggctggcatcttctgtatttaattgataagggataagtattagtcaggtgaaatcaatgtaacatggagttattatatacatcttccagaagttggtctaggttcattttgtatgaccaaatcattaagagtccaaattgtcacactcctaacaatgtacaagttcctccaacttacctcaaagtttgaatttaatcacacttgtcagcataacaagccagcctccctccctccctccctccctgacaaaagggatgcccaattccaactgtgaagacccaaacttgtcagtctttcaaaaggatgtttgaagtgtaagtgcatgcccccctctttggttcacaccacaaatgaacagtgccaaggcactccccactttttctttcaccattagggcaaatggcaacataactgttctagacaaaccaatagattaaaaagtcattccacagtttgactatttaggacataggtttattgccaaactttcacataactaaaacaagcacagtgacaagtcaagccacatttgtaagcttcatccatttgtaacatttatgagttatagattagagtttatatctgtggggaaaatttttaatataacaagctgttatattgctcaaaagaaccactgagtatttcttttcatctgccagatattcagcaatgacaactatatggttttaaattttctaagctattacactttccttcaactaatacagcaagtagcttatttcccttctgaaatacttcagctttttaatttctagttcaaagcttctgacagttttgctttctaaaacacgaacaagtctgcatttaaaatgttcaataacattcaaaacaatctgacactcattgaaatgactcctttcaaaatgactacacaatattgctcgcaccaacacaaaagttagtatgttgcaaaagacatgctatattaaactctctaaagacagtatacatttaagaaatgttctggacaaacacttctacatgtcagttttatatatattataacacaaacggtgttaattgaataattaagcattttaaaagcatgaaactacaaccattgttcataaataagttctaacgttgtggttttataatttggaactttggggaaatgttcaaaacattttatgacaaacacctttatcctcacatacaaagaaagctacaatacttaaaatggtaattgcataacacattgcatggattatacaaggtgtaacttaagagtttaattcatacagaacacatatgttctacctacactacattagaaaaatccaaactgcatagcaacatttaacacagtgacattactgtcactgaccatcatgcctctgcttgcttctgagaacataaatggcaacatcttgggattatgaacatcatgttgatctcgaagacctgttgctgctcagacagcagaaatatagccttaaacaagcactgtcctgtcctcaaggaatgatctaaaggaggaaaaacaataattacacaattaatattcttaattaagactttaagagccatggcaatgttcaagcaggaccaaatgtggtgcagtgttgagggcaatctgggaaggttccttaagaagttatgttctgagaccattctcagtggctcaacaacacttggtcaaaaattttaattctcccctcagagaaatggagtagttactccactttcaagttccttataagcttaccatcaaccttatagtacactctagatgtcctgaaatatttctatcagaacaaggtagtataaagctggtaggtatacaaaacgctagactagtttctatccctgacccttaatctgctagtatatccgtaggaagttgcttaagtgccactagtaccaacagcctctgttagagtgaacagtagattttaatgaagggccaataaagaccacttaagactactgactgaattaaaaatccacccagtggagttagtattggttatagttatataacaaaatatccaacttagccaggcgtggtggtgcacgcctttaatcccggcactcaggaggcagaggcaggcggatttctgagttcgaggccagcctggtctacaaagtgagttccaggacagccagggctatacagagaaaccctgtctcgaaaaaccaaaaaaaaaaaaaaaaaggaaaaaaaatatggcttgaaaacatgctattgttgtcaaaaggagatccaaacaagtatttctttgaacaaaaattatgtagaaaacagggtgataaagaacaagggctttttaaaaaaggccagcattatttgagatatacaagtgactccaattcaagcctaaaggccactcaatgctcactaacagtgctaatcagaatcaattccttagcccagtcaaaaatagtcctgaatatcttctggataaacatgtcctccaacatataaactagtatacactaacaaaacgtctcaacttcaaggtgaaatgcttgactcctagacttgtgacccagcaaagtgctctataggtagggttactaggtcagagagtcttgcctgcaaaccacaattatacaattccaccaaatgtaagacatgtaaaaatgacttatttagctcaggttttgaaaattaaaaatcaaacccacaaagacctaactttcacattaagtacaaatgtttaacatatataacatgttttgccttgatatatgaaatcatatgacatcacctgacaggaaacttaagtttatttgaacaacaatcagcctaaggtaggcctagcacatgatcaggatagtgcagggaaacccaaagaagtgcttctgagtataaaccaagagacctcgaaatagcagctttgttctgtatctcatgggctttaactatcacttgaaaacaatttcacaaatcacaaaaccaacatttgtttagtttccaactctgcctattcaccggagaaatccatgtcccaatttgatgggggaaaacttgaatgaaatattatttggaatattttaatatccctgtgtatatgcagatggtttaaagacaggtaaccttaactgtagtttcttggttgtctgccttgttttttgaaatatgctctcaccaggagcctgccaagtaactactcttgtgtgctcagcaagtcctagggatcccttaagcatgctctaacaggcctggcttttttttttaaaaagtaggttgcggtgataataattcaagttttcatcacttgaaacacattttaccaactatcacccaagctcccttagtgtgtcccctataaaagaatctgacctgcaagttccaaaagtattactacattttaaccttagtattcaggagacaaaagcaggcagaactttagtctacatatcttgttgcagatcaggcagagatacatagtgagaccctgcctcaggaaaagctatcatttttatattcacagtaagcaaattaacattaaaagtcagaaattcttaatttgactttggctgtgaagaatttggattctctggatttgaaactagaaaatctgattaagcgatgcaacagtttctgtatactaaaactctaagacccttggttctaaagataccacatttaaaaaaaaagttaagtataagacaaaaagccttaatagctcttttataggggagggactcatttaatattagtccacctcactcctcataactattttatgaggtttattatataacccattttttaaaaaaaaaattaaaggacaattttagtgtttgaaagatttcccaaccccaccctggaaatcaggctgcaaatctcagcagctgcccttagaaggcaaaaagccatgccatttaagccatgggaagttagtagcaaacaagagaccacatggcaggaaggaggctttaaagaaagcccacagtgtcaaaagacccaaccaacagcagagacagaaaaaataatacccaaatctcatcagaaaggtagacggatttagccacatccatagtggctcattagggaatgcttcaattataattttatgaaatctcagagcccccctccccaacagggtttctgtgtgtattcctggctatcctagatagaacttgatgtgtagaccaggctgggctcaaactcagagatctgcctgtctctgcctccagagtgctgggattaaaggcataaaggcaagcaccaccactggctggctaaactctggccctacatttttgaaatccaaaattatcattacttgctttcatgtttagtaatggctgcagacttagctttcagctttgtatagatgaagcacaaaagttaagtaaagctagcagtttaaacaaataggatactagaagttcaatttttatttctttattgcttagtgtaagagaaaagacattaaagtctgcattggtcttctgtatcccacaagtctgcagttatggctcctctgtccacagttacacttcaaataaaaattagttccttggtaacatttccagtgcttaaagagtaatttgattattggctaccatattggaacaaacacaaagtatttcattacttcagtaaattctactggagacagtattctctttaaaaaaaaaaaaaagaagaagaaggaggatttatttatttaatgtgaatacacttgtggtcttcagacacaccagaagagggcatcagatcccattacagatggttgtgagccaccatgtggttgctgggaattgaactcaggacttctggaagagcagtctgtgctcttgaactccgagccacctctccagcccctggatagtattattatagagcacaagcacacacaacacaacaacctaaaaaccaagcttcacaaatacatttgttgcttaatcattttacttgtgtttggctacaagtcaagcaaaattataggtcctgaagaagcttggcaaaatcacatttagaccagcaataacgtgtagaatgccatgagtcaagccagtccaagagaaagcactgcttaaatagaaaaaatacaagctcacaagaccttaggtcaggaaagacaacaaacacctgaactttgcattccaaaaggaaccaccttttacagatgtgtacaatgacaaaattttagtaagcagtaatcaataccatgtggctcaataatgaaatataccttttaatgtcttaaaatatcagcctggcaatatgtaagatacatcaggtaatattgggggaggagacatccacctggaaaccattaatggttaatagctcagtttataaatggagaaaaaggagagaggcattcatgggagtggaaagttaagctttaggttggattctcaatacatctattgttgtaaaactccctggactgagaataggcccaaatgtggaacaccacctgacgggagaggtgatagacactgaaaattaaggatcaaggcaaaggatcaacaaaaagtgtactaaggagttataaaagaactgcagtgttgaggccccagctacagcctcgatttgtggtgtatgtaactaatctgtctggtttcatgagtcatcagacttctaagatcaggaaagggaaaatgccaatgctctgtctaggggttggataagccagtataataaatgaaaatggggctaaaatgagtgttctaaaataccttttgataaggctgcagaaggagcgggagaaatggatatgaagtactgggctctttaaaaatgattaaaattctgcttacatagtctaactcgcgacactgtaatttcatactgtagtaaggatctcaagcaggagagtataaaactcgggtgagcatgtctttaatctacctcgatggaaaatactccgaggcggatcacaagcaataataacctgtagttttgctgcataaaaccccagatgactacctatcctcccattttccttatttgcccctattaaaaaacttcccgacaaaaccgaaaatctgtgggaagtcttgtccctccaattttacacctgttcaattcccctgcaggacaacgcccacacaccaggttagcctttaagcctgcccagaagactcccgcccatcttctagaaagactggagttgcagatcacgagggaagagggggaagggattctcccaggcccagggcggtcctcagaagccaggaggcagcagagaactcccagaaaggtattgcaacactcccctcccccctccggagaagggtgcggccttctccccgcctactccactgcagctcccttactgataacaactcagagcgactttgggagagcaagtgcttcctgcctccaaaacagcccaactgagccctcgctccttccctccactccccggagtgcgcgatggaggtctggctcagcacgcccctcttgaggcaactcaagtcggaaacgtgcttgcacccgccccgcagccgctcagccctactgcccgtccccgcccccagcgcgcgcttcctgccacgttgcgcaggggcgcgcggccagactctgcggcgcggggccgaggggagggccggaacctgggagcgcctcctcgccgcccccgctggccggcggatggactcaacttgcacgaacacgagccaatggcaagggccagttttctgggccccgagagccaatcagacgacgaggcccggccggcggcgggtaaaacgactcccccagaggaaggggagggtgggcggccgctcgcgcgcgagctactttcgctgaccctccctcccctcccccgccccgccagaggccgaccgcgcccgcacgtccagctcgcctcaccccacctacctcccgccccacccagtgggcagagcgaggctgccggcggctgcgcactccggctgccgttaactgacaggcgccttacgccaaccaaaacacgccatttgtgttttcacacacggcgggaggaaaagaagccaatcagcgacgagacgtcggccggaagcgctcctccgctgcccccccccccccgagccatggccgcgtccggtggagacttttccgctcccttctccctccccctccggttgctgcagggcggaccgcattcctgcccaccacccgcttgccccttccagcgtcacgactcgtacccggctgtctcacagaacggctccaccacgctcggagggcctgccgcggccgcccatccccgcaaacgcaccaagccgccctcccgccagagtcccgatcccctacctagccgaggctctctgaggagccggagccccaaagcacagcctcttctttaggcggccccggcagcctccgctgattggcggcgcaccggccaataagtgtggggcggtgggcggagaggccaatggcgcggcgggagggggcgtgtcccgcgtgcccctggcgccggcactgggaatccccgtgcggtcagtggcgtttccgctcgggcagcgggctgagtgagctgccgccgctgccgccgctgccgccgccgggggaggggcggccgccgcccgcctgcgctcagagactcacgcagccctagtcccgccagtccgccaacacagtagtgccggccccctccgcccctggccctccccctccccgcctcgggctcgctccgccttttctgccccccacccccacctcacgggtacgggccattcccggccaggaaacgccgtggcgccgcgttgggcctaactcgagtctcgctgcctcccgggagtgccgtgcgccgcagcccgggcccaggccccggcagcgcctgggtcaaggtaagggtccaacagaaaagagacaccgaaccacacgaccgggccccgggggaaagaagggtcacctcagtctccctgcgttccctctcctcggggtcgtgggcctgggcctccccagcctggtagcaggaagatgcttgcccttttcgtcttctcagctacctttacacaccattgcaccgctcttgcccagagagaaaggctctccttcatctagtcgaccccactacctttttaatgtcttccctgggtcaggactcttcccctccccctactctggtctcccctttttgcctgggtattgcctactccacgtttatacccttttcaggagaggcctcccaaccctgctctcaaaatacacatacttttttttctgtccctgagccccccacctcccctgttcttgcggccttgtgacaactctggtcgctcgtgggggcccagtcctcccctccataatcttcctgaacgcctctcctctggttttccagttcctatctcagatggctgctgcttttcccacaccaaagacattaccttcgccacccccacctcacattcttggactccctgtggcgtatgccccagtatccttgcgatatccctgttgaatttgtagggttctagcctggaattgagccagattttgtcgttttccctgcctagggcgtggagagcgatcttttaagaacgactctaaagaagagggggagggatatgcccctatgaatccgtgcaagccaagatcctaggtaaatggtagtgggcaaaagccctggttttagtaggtaatcgctcagaaggaaagttttaactcctgggaaagccccttctatgctaatttattctatcgggcgcctttgcctttctcattcttaggaataaggatctttctcctgtgtactgatgctgcagcccgccctgctggcctgggtcaggggtgcgtggatgacctgcattttctgctttctcatgttacttgtgtaacgtcttcaccagcaactcatttttcgcccagagctctgggctctgggttttgtctatacctggattccttttgccaattgttcctgtgctcaaaatacttaaaaagattcaggttctcgaatttcctccataccttgactaaattgtttttagatgacatatttgtgaccaaggtcatgtttacattacttccttgcttatatgttaaatacctatacttttgattggggaggatccagatggaggaggttccaggaggaggtttgtgtgcagcatattgagaggaaagtgttttgatggttaatttgatattaataatggtttaggtcgctaggaggaaaactttaagaggttattttagatgtgtgcaatctgacctaggactaaagcagagaatactgacataattagagatttctgagtttggaggacacaggaatttcttttccctggatttcttccagttttctcaggaggatcattagttctctgtccaaaatttgtggcctgttatgggattagaggctttaaggttattcagattgtcatgtgtagaatattgagttatgttctttggtaggacatgacccaaggctcttgttcctagctgtaaatttaaatatgattgctgaatgtttggaaaattgacctttttaaaactaaaacttaatgcttatatccacattgctggtttaattaaaacgaatatttggaatttggtatttgttgattttcaaatcaaagacctcaatttaaaagtgaccttaggattgttcctttctaaaagcatagttccaatccttccagcatggagcacttgttcccccccccccccaaaaaaaagtgtgttaagaagtgggggtggggtaaagaaaaggttgctcctgtgttggatcacaggagtgagtatacaaggcggcagcagctgctggctctggagctctggttgctacgtgagaagcttgagtagtgctggctgctgtctccagggaaggacagcagtgcagcgtccattaatgctgttggctgcagggaactgcacttagtgatggctgctcaggctggaaagaaaccttgcttgctttcctgggaaattgtactgctgagctgctttgctttttgctagtgaagagaccagaattagcaattcataactgtatccatttatggatatcagcatctgaaaactggatcaaagttaaagacttggggttttttgtttgaggaggggttggaagctttttgttactatctgaggttttacccttcacaggacttaaagttcattagtgttttgatcttttttaacccctaaaaaacctaaaaatagtaatgtgggtaatagggtgaggaggatctttgttttgttttcccagtgcaagtgacatgaattcctccatcttttaattgcttgagtcatttcagatttgtatttgtctctccgtattaggccgtatttacctttgtgaatagattgatgttctttgaaacatcttactatatatttggatgcctaaactaaaaagagctgcttttggattaatgcttggtttgttgttaattctaaattaatctgtagacctctccagattagatatacttactgatatctgacctataaattggattaatcgtgtatgtgttggattatagactttccaccgaacaaagatgtgttttggcagtaatccatcagagacacagaaggaatattcagaaattgagtaagtttagttcaagatactaagaaggcagcaagagtccattctaagcccaccctacccctaaccaaatagaaccagggtgatctttgattaagcctttttaagtagtttgtctggcaaggaatatttgaaactgaaccatcacccaggcatgtgcagcacataaaatcgtagggtttttcctccctaggattattactgcaaccaatgccttttccttcgggagtctgtttaattttgtacaaatttatttagatcccataaatgtaatggttctagaatttgtagcaaaaaatgaagaaacattgtagagtattttgaattcacaaatgtagttcatattgtttttccagtgctaaaagcaagtccataaaacaaaactctgttaatgattgttttagatggttgtaataatatttttgttacgtagattaggtgctgtatcccataagtatgatatcactcatactgatattacagttcaaggtatttacagttaaggtgcaagtgttttgagcttaattataatatacaagttcccttagaaaataatgactaccacttttatttcctgtttttttggatctgattgtggtcttacagtaatctctggaagatcaagaggcttttttcttagaaggattacttgaactgacacacttaaaaatgcctacatcttgatactgcttagtatctagaagcctgtatactttagaaattattctgacccttttgatgaaggtggaactttgaaacataaggcaatagtagtcagtaattattgagtacatatctacaataaattagatcataagtaaaataaaattttattacaacttttggctaaactagtttttttttttttttttcagtttaatttgaaattaggaggcctgactagtggtgaacttagactgaaatatgcgtataatatgcgtataatagttcaactggtagtcattttttttaaactggtagtcatttataatttggtttaaagtgtcctttcagatagacttagaaaagaagagcaatgcacctatgaggtagataagtcttggagcccagatattctaacacatctagtaaatggcatgaccttcatttggtattgtgattcgtttctctagtggctggaattcagggaaattgcaaaaggtaaaaggagtagcctttctttcacttaacgatacgtatagtgaaattgtcttgttgtgtattaagttataaactgggtagacatgccagtaaccctgagagttggttctgttagaaagcatcccttggacgagttcttactcagtacttgaagaaaggagctgtgaggtacacaaaagtacagtctatgtttttcttatgagtaagggttctcaaaccccaaccccttccttccattactgtttccttccttccttccttccttccttccttccttccttccttcctttctttctttctttctttctttttttcagagtatctagggaaatgcctgaatgtaaatttccataaagtatctttggtgtcaggaaagtgatttttttttttaatcttttaaaaatcattggtattctcaaaaccctaagagtattgctcagttttgtttgtggtgtgtgtgtttgccacttccatgtctcttctgtcttgtagtatgaggcttcccagagttttcatggcacattgaagtgataatcatacatgtatataccagagatgaagaaacctaatttagggattacaacacaaaacagcaacaaatcagtggctataagaattctggctagagaatcaagtttttgatttatactacggaatcgaggggaaatgccagttccttgctgctctatttgagaactaggtggaagtatgggaggagccacagacctctgcagcaggattttgtgtgagtagaaaaggaagatttttgtttgaaatcgccagctgcttatgtcagactgactcccttattatgcctccagtaggcctgtcaatatggccaaacagctagataagtgcggggcaggacaaagggctctttgcacagcagggaggcagtgttggtgggggaggggccggaggtagggaaggaaagagatttttttttccccctaggagagtattcactttggtttacaattaaagaaactgtttttagttttcacttacgcctttaatttatgtcaagcacatacttttaaaacccaaatttcatacggtctagaaatcagaaagaacctatcctatcttctgaggagtggggaggccccaaagctttgtatggattaaagtgagttccatgttccctgtccttataaatgtaagttgcctccttagtggaccaggtctagagcatctaggttttagtaatgattggaatgacctattctgtgtaaagtaaatttgtatttcagtatatgcagtatgtttagttgggtttagatttgacaaggtgtactgttttcctttgtgcaatatttatatgtttgatcattatgtaaaatgtgaactgaaaaaggatttttataagggccttttagcttacatctgtatgttctgtactcaggaaactgactcaagagactgagccaaagactgatgccagccaaactataaaataagactctgccgggtgtggtggcgcacgcctttaatcccagcacttgggaggtagagacaggtgaatttctgagttcgaggccagcctggtctacagagtgagttccaggacagccagggctacacagagaaaccctgtctcaaaaaacaaaaaacaaaaacaaaaacaaaaaaaaacaaaaaaaaagaataagactcttgtatcaacaaacaaacatacaggaacccccttcctccccacccccaaacacataaggagagcttaccttattgtttcagtcttcctcctacttcctgcagaatctgatatgctctggagattactacctgtccccatcttttagtttaggcttaattctattagtttgtgcttgactctcagcaaaaggtgattgcatctagcttattacttaatgaaaattatggtgttagaggtgtgtaagttgtatctcttataggcaaagccatgagagatactgccaaaattaggttcctgttgaaggtgttattaaaatgttaaagactctatcctgaatcatttcaggtactttaaaggaaatgtcaaatgttacatgtatgctagttcattttaaaaattacactcacaaattagacagtagttatttagattacaaaagttcttccttatagagtagtatatgacagcacatttccacgaacgaatgttttgctttaagagaattaatttttagaaatccttgaactgtttttccaagagcacatctgttgcttgagtgagatagagaatcggaatgatgattactttgtgtagcaaagaagacattgttgtagacgaacataaccagaatgctgcatgtaatgtacattgatcgagtttttgttgttttgttttgcatcatttctctcttttgtaaaaagaagtacagcatgttacccatgtaacattttattttaagtatggcagtcttggcagttacagtacacaaaatattttgatctgaaaaaaaattaaaagactggtcgaaggctcagttggtcaggtatttgtaaaaagagtacttgagttcagtttctcaaactcacgtaaaattgtgtgtgctgcttgtaatcccagccctgggcagacagagatgccaggtctctagggcttactcactggtcagcctggcctacttgtccagtttaggctagtaagagaccctgtctgagttgtggggaaagaattcctgaaaaatgaaatgaggttgtcctctggcctgaacatgcatacccttgttcacacatgcccaaacaagaaagtacatttgtgttattatcactgctgggaaacatttctcatcagcaaaatagcaacaattttaatgtgaactctagtgatacctcattatacattacaatagaaatttagatggtcttttcttctttttatagtctgttaacatggattattcccataaatttgtgggaactaaaaggaagctggtttttctagctccagtgtctctatcaaatatctattgctagcattagggttcccttgcaaaaaatactagaaatgtagcttttattgcttcaaccgaatcaaactagagacctaaaacagattctgacaaacgtgagaaagtaggagattacatcttgattccagtaatatttataacttgtagcttcccaaatagctaatttcatttttgtaagatcgaggcagcagtaggccagcatggaggtgaagcacacacagcacctcatcttggtgtgcagctgctccaccttacttcctgctattattatcccactacgcctcttcccagcaaaaaaagaaactaggacaaagggggaaattgaatgggctgctgtagtttatagcttatgttaggttgtggatttgtttatatgttctaaagctagtactttaaaggctagtgacaaataacttttatatcttccactcttggtacactgtttcagattctgagcttacagaaagatttttaaagcatgtaatatcattggctgtttataataattaccactaccagatgccattgtattataaggtgaaatccattctctatttgtagtttttattttgcagcttgggtctatgactagaattgagatttttaacattaaacctatctatctacctatagatagttagataaagatatatacctctctaacaattaaatagtcgattgaatatgaaaatttcatgcctgaattattttaaactttcttttccaacattactcaaactgaaatttttattttttgccatttttgttgtattttggtgctcagattttctccctcttcactcctgaaatgtggagacttggaccccacccctacccccaataattcatatggtacatgtgtgctactattatagtaagagtggaaactttgtaattcttagacattatgatctggttagaattttctaggtttgtgctcaaatcaatccacagggatttcattattttatgtttacatttattgttgatttgtattaggaagttattgttttctctcccaatgtatataactctttaaaaaaatttattcttgtcttgttctgatttttatcccatactgaaaaattctatttcctatcaccaaccatagcatatacttttgtgccttcatgtcttctgtgaaggagtgcaatgcaatctacagctaacaatcaactgaacactcttggtatccaagcaaggttttacttaggaaaaagaaccttaaaggatattttagcaattagttttcctctgcatttatttgtattacatttttcttcatttatttttttttttttctttttccaatggactgttgagaattggcttgtttttagggggtagttatatttattcttaaaataaatgtggttattgtgacatttgagatagactcaaaagagtgcttttttgtcgtttttgagtcttgaacccaggaccttgcatgtattggtaagtgctatatatatgtgagcccagaaggatacttaaaacaagtatttaaccacctaatgcagaacaaagataggtttttgaggcagtgagattgaccacagggtgaatgtaacattaaattgctgtacgaacacataaattttatttttcaattctgtggcacaaacaactacagccatggaaataggtgtgtttctgtgcccacagcctgaaaatgttagctagatttttttttaagaacaaatctagaaaaaatgtaggagcaagtctaaaattgtaggctcttttaaaatagttccgttctttctagacaaatttacttttatttataccagataaaacttttaattcatgacccagcaaaagtacaaaaccaggtcaggttggttatgtcaaagaacatcttaagatgaagctaaaaatatatgaaattgttaggatgtttgtgtttaggctacttttattgagagagtgtcaatgtttaaaaatctttaaaacaaaatcttcccaggttaacaatcactttattgactgcacagtaaataagcagaagtatcaaagaatcaaaacaagtaaacattgctagcatcaggtatattgctcagaagttagtgttgctatataagtattagaacaagtaaataagaaagctaactccaaggtacttttactttgggatcttgggcttaattgacttaaaccaaatgtttttattttactcatacttggtgcttaggtcattaggcttcacagtattgctagtcctaatggatcagttcatgatttgagtagaaatctagtctttttttttttttttttttttgagaaacatgactctggattggtgtaactttcctttgtagtttattatgaactgttagtatgaaaaagaatggctggaaatttgcatagtatacaaagcaacaagaagtaggcatactctataaaatagtgtgggagctggatagctcaggattaagagaacttcctgatctgctgtagtggccttctgcagtagggtcctaatgctgcgattctttagtacagttctttatgtggtgacccaccagccataaggttattttcattgctgcttcataactgtaattttgctactattatgaattgtaagtatccgtgttttctgatggtcttgaaggctacctgagggagtcacaaccaacatgttgaaaaccactgtatagaggatcaggatccaagtttggtgcctagcacactcaagcttaaggggagctgatggtctcttctggccgtcaagggaaccacattcatatgcatacaatttaaaaataagggaaccacattcatatgcaaacaatttaaaaataaatctttcacaaaagttgcaatgttctaaacaagagaggtgaaaagtaattttttgtggaatgagttagttttgcctaaatgtgtaataatagtaatacatttctattgcaggtaattgtgcaaaggattcaactacattttttaaagttctgtttattttctagttatgggtgttttgtctgcatctgtgtttgtgcatcatgattttgcatgataacctgtagaggccagacaaaggtgccagatcctctagtattgaatttacagatggttataagccaccatttgagttctaggaattgaactctggtcctctccagcacctcagatgattgtctttttgagaacaatggggggggggggaagcaagtgttctatcactacaccctagacccaaaattatttttcttaatcttttatgaggagggaccatgagtttccctagaacagaccatcaactggaggaaactcttagtccctacctagcaaaccagttttctttgtagagttctgattctgtgctagaatttgtctgttggtcttttattctcccctgtaagcaatttttagaatgtattttttttttatttaatagtatggcaagaagtagctagagattagattaggaaaaatgtatttcctttggactttataaaattgttagtttaaaataccttatttagagcagggaaggtggtataagccctagattctcctaccacaccctactcaaattcacttggttaagggccataatgggactggagaaatggctcagcagttaagagcacttgctgcttttatagaggatccaggttggggtctcaacatccagaaggtagcttacaaccctctgtaactctagttccagggaatctgacaccctcttctggcttccacagtcatcaggcacacctgtggttctgacacataaatacaggcagaacaccccatgtagagagaaatcactttttttaattaatttatttttttattaggtattttcctcgtttacattttcaatgctatcccaaaattccccccatacccaccccccccaatcccctacccacccactccccctttttggccctggcgttcccctgtactggggcatataaagtttgcaagaccaatgggcctctctttccactgatggccgactaggccatcttctgatacatatgcagctagagacaagagctcccgggtactggttagttcatattgttgttccacctatagggttgcagttccctttagctccttggggaatttttctagctcctccattgggggccgtgtgacccatccaatagctgactgtgagcatccacttctgtgtttgctaggccccgggagaaatcactttttaaggtaaggtcaatatattgggctttattggtttgagtctgtaggttttacctccttttcttttgtgtcctgtgtatatttttttaaatgctgttttacagtttctaattttttgggtttaaaggctagattgtcattagtacattttactgagagatatccttatacctatatttcatatgaattggtgatgagttagattgcagggatactttataatggtagtatgtactttgttgaatttcatagtatttgcctaattatgatattaaacaactgttgatattggtggcctagatcaactaccctcacactttaaagtattaaacatgagttcccatgagttcccaaagaattagtgtttgagtggttctctacactaagatttagtacttgaagttaaaaccagaataattctggagcaatggcttagtgatccagaacatatgctgctcttccagagaaagagttcagtttcaggcactcatgcaggtagctcacaagtgccttcatctagcctccttggcatgcacacttgtacacttaagagataaatcctgggctgtcgagatggctcaatgggtaagagcactgactgctcttccgaaggtcccgagttcaaatcccagcaaccacatggtggctcacaaccatctgtaatgagatctgatgctctcttctggtgtgtccgaagacagctacagtgtacttatttattataataaataaataaatctttaaaaaaagagagataaatccttaaagtttttaattactaataggaatttttaaaaaagacttatttattacatatacagcattctgcctgcatgtatgcctgcaggccagaagagggcatcagatttcattatagatggttgtgagccactatgtggtttgtgggaattgaactcaggatctctggaagagcaaccagtgctcttaacctctgagccatctttccagcccactaacaaggcttttaaaaacaaggagtattgttgacatgcctgtttgtttgtttgtttgtttgtttgttttgagacagggtttctctgtgtagccctggctgttctggaactcactctgtagaccaggttggcacctagtttacagagatctgcctgcctctgcctcctgaatgctggtattaaaggctttcacaaccaccacccagcttgatatgaacaataactttctatttttttaattacattattttacaattttgcaaatctctttagtatcttaatagaagacagctgtgttttcaaaactgcttctttaattttcacaatcagctgaaaacaggatatccatatactcatggatatacagtcagaaaataggaaactcagggtgccccttgagggagtctagcagtgaaatactactgttttgtgctcatggttttgaatatgtttaatgtgttagcattctgctgtatttttgacatattcagattatactgcctttagctgttagctaaataaatcctttaaattcatcttagtagcttccttgcttgtttcattgctctctagttcttgtgttctattataacccaatgttttaggatcatttttaccatttttcaccccaaacagttgctgggttgtgtggttgtgcatgtgtggagtgagggtgtttcattttccttttgtgacagggtcttgggcacaggcttgccctagaacctcaggtcttcctttctactttggttgtctcacacagtcttggtttgttttaatggtaaatgatccttagagacaaggaatgttcattggtctttaattgatctgtttctagatcttttaaataagcaaagctttaaaaatgattttttttaaaacacccgactacttatatttcaaattcagtaccacatagttaatgtaaactgatctttttttctgtgcacaactcccaatttccagtgacaccaacatatttcttcactttatttttgccacagtatacttgaaacagtttcagattagtagaacaatatgattactaaaagttgaatggtttgctttattctgtttacttttctttaaaacatatcccttcgaatatagtcatctaaattacagcattttaaattttttggtgtgtgctctgattataccaccagctagaaacttagtgaagtaatttttatttcactttcagatttttcagggattaccttttgctttgcaagtaaataaaatatttttctagttattatgtaaaatatagaaagctaagtatgataaaaaaaaatcctgcttttagccctgaggacttcatccctgttctctttctgtcacacactcagacttcacctattctttattaaacatactgtttaataaagaatatatgtttataaagaagaggtgtatttttttgcatttacatttatttttggggaggcatgcacatttacatgcctgaagtcagaagttaactcgtgagttagttttcttggcatatgtattctggggatcaaatgtgaaccatcttgctaactcacagtggtattttctcaggatacttctgttttaagtgtctaaaaagtaagttaatacaaactatctcattttagattttcaataatttttcaatagatagttttataccataaaagtagtggcatagagtttcttagaaaccaggatttcttgacttagtataatttattggggtagaaatacgcctttttcttctaaaaatgtgtgttgaaatgctaggtcatgtttgttcctggtggacgccactgctgcagtagctcctcagcagacattcctttttttttttttttttcttcgagacagggtttctctgtgtatcttaactcagaaatttgcctgcctccgcctcccaagtgctgggattaaaggcctgcaccaccacacccggctagcagacatttcatgaatgtttataaaaagtaccatttcagatgaattcaggtgttttaaaaatgagttaaatgttttattcttgctaactgagatatcctaagagttacagtttcacattttaacactatcaagttgtaataagtagactaacattattaaactcacaacaggtgagtcagtgaagaaatagtgattacaaggatgtgaaggttctaaaagggaaaaatatatggtgtgtatttttgtatataaatttaaattaaaaagaaagcaaataggtacactttgagttgtccccacttcagcccacacaaaactatatgggagctctgaaattgtatagactttaattcatgttctggtgcttctgttaatgtgtgtgcacacgttaataaaataaaaaatcaggtacttgaaggcaagaaggtggtgcaggatctcctagagatggaattaagtatttgtgagcagtccaacatttgtgctgggaattgaacttacttcttttgcaagagcagtatgcactctattaactgctgagccatctcttcagacccagattctagtttgtttttttccaagacaggatttctctgtgtatccttggctgtcctgaaactcagagatccacctgcctctgcctcccaagagctgagattaaaggcgtgcgccaccactgcccagcctgattcaagtgtcttggcaaatttaatttgccctaatagaaatagtgccttcctcatagagttgttattataaatgttacatggaaatggaatatagaaaaactttctggtacagaataatcagtaaaaggtagcttttaatttgaaagttggtattctgctgtgcgtatctgattagtttttaaacttcaaccttacttagggttatgttcataattttgtaaatagcacctgatttttattattccattgattatatgaaaataactaattgttttttttaaaaaggagtaattggtacttagctgaaatttgaagcttctgagagctttgcctgtacttagcagtgttttgccacagagctatattcccagtccctcttcctttaagtctttgtagcccaggttgacattgaacttgtgaatctgactgcctccaacacctaagtttcactacatgttttcattatcatactaggcaggtctctcattttataaatatgccagtgtttacttcagaaatgtaatcaggttaaaaattcttgctgtgctgtccaactagagatcagtctctagatctcacttaaagttggaaggagagcaccagctcccaaaagattgtcccatggggcctagagagatagctcagcaataaagaacactgtctcagtcttccagaggttctgagttcaattcccagcaaccacatggtggcacacaaccatctgtaataggatctgataccctcttctggtctgtctgaagacagctattatttgtatatacatgctgaagtattgcttatgataggctatctgtgatttgctttggaatgaaaatcagttgtaggatttgtaaaactggctaatgactatatgaactagaattatttcagttttgtgcctatttaaaaatcttccttataaaacattttaaatttagagtaaaagttgaccatagtgggacctggtcaagcagactacaatagcagaatcagcgggtatacctgtaatctgaatacttgttggtgtaggtaagacagactcgtttagagttggaagccagcctgggcttcagaatagggtccaatctcaaaataaaaacaaaactccaaacagaaccagatggtttggtttctccctgttgtttactgtatgtactatgagccaagttcatctcctgaccatcacatatttccagtcaacaacgaaatggagtggctcaataaaaatatagtggcctatatagagtagggattttttgtttgtttgtttttctggttttgttttgagacagggtgtagccttggttgccctggaacttcctttatagaccagactgagatatatcacaatttttaaaattttaaagaagtctacaaagtttggaaagccttcttgactggaagattgaggaggtaaatttgttaattattaatatgttcagtatatagtagatctttgagttggctgaatttttggtgaagcatctcataaataccagatttatgccaaatactgaagctttaccaaagaaatctgacctggtatttaaataagcctgtttactactcaggccttagcatcactagtgacatggaacaaaactgtccattcctcaacttcacttgaaacggttgccttagaagaaggagttccttgtttgttttcatcttagttcctattctattccttttgtattggaaagctgtatatcaaaatttgtaatgtgctaagttcttagaaccatgcacttaggtgaattataacagatttaattagaatgaccacacagctaaataatatggtatatcaaatctgtcgatttcaagatcttttcattataccatgtcactcttctgatttcaggaacctttgactgtgctgttaaaatcttcactttcttccatttgttgtttagatatattttgagttttttttccttcaggctgctttgtcagaagaggaaataaatgggaagttattgagagttatcccttattatagtgattgcaaattcttatttcctggtaatgggaggcaaagcttccagatatctgtataccataagttgcttttgagcctcctttattccagactagttgcagttcagaagatatatatatagagcaaaaacttgggtttctggatactttagatcatattttgatttttttgtttgtttttgtttttgaggaaaagttgtatggtctttatcaggttattatggatatcaatgaccactccttaacagcacctgtttttcattattccattgattatatgaaaagtataagaactacagatatcctagaatttgtttaagaaagcaacatataccagattcagctaattttttggtctgaaaagggtaacaaactattatgaagcccacctatgaagcagttcttgtctgagtaaagacttgtatatatagtgtaaacaaagttctcagtacatgaatggatgttcagtgcaacactgcagagtaccaaaaatgagtatctgcctgctgaagaatcatttaaattataatgaatcaatagaacagtgctacagtatcattgaagaagtacatatttaaatatggtcacgttaaatatcaaaaccagtttacaaaaccagtcagactattccttttctcttttaagaggatacacgagaattttacttctgttttttatgttcttctaatgataggttttttgtttgtttgtttgtttgcaatatatagtatcactgtgtggctctagtcagcctgaaacttggtatgtagactaaccttaaacttagaaaaagtctttgtctcttcatgttgtagaattcctgccatttgcccagcacacccagttatgattgtatactttataagcatctttgtaatagagccggaccactgcagtgaggaggcctcttgtacacatcagagtattatgcttaaggtttctttggtgttactgtccttagctgtcatttgagaaatcttctatcatattttcctttattacggtaagaaaaagtttgtgttttctaaacaacaagctacttacacaagaaactcccctggtaaacaatgcagtggattggcttttaagcagacaggagggttactttcccttcagaatttgactcagttataggaagaaacatagttaagaggtatttttggtttggtatgatttttgtttttcttgtaagtggttgtcaacatgtaattcttgtcacatgagtaaacctaaagagttaaacatattcaaggacagggtgaggtgatgattccacatcctaaatccagcatttgggtggaggaggcaggatcttttaagtttgaggagttctaggccagccagaacaatatagtgagaccaagtgtctcaaaaaaaaaaaaaagaagaagaaggcggcttcagggctgataatgtggcttagttggtaaaagtgcttgcctaccatgcaaacagctctagacttgattcctatcaccatataaaactctaggtgttttggtacatccctattattagcatgcaggaggtagaggcaggtgaattggagtttgaaatcagcctacagagtacctaagatggaagacacaccttcagatagcttttatgttcatagtaattgtttgttgtcattgataaagggagaagtgggaaatctgcatatataaaactcaaggtaaagctacataatataaattcccccagagagctggaagattctggacttgttaataaacacacttttaatttagatattgctacccaacgtaattagtttaataaataaaagctacgtgttaaaatcttaattttcttttgaaatctgctgtatttgtgactttcttgtgagtaaattccccctttcattgttactcatacaacccagagcttattgaatgctaggcaagcactctaccactcagctataccttcagttccctgagttaatctttttctaattatgtttttgtctgtaaaataatcaaggtttggcgatgtctcagtgattaaaagtacttgcctcacaagcatgagagctgggtttgagtaaacccatgcaaaactgtacaggtctgttattccagcctgtaagagagtccagacaggaaagtcaccagaatcgcctgataacttcaggtatcagtcttcctctgacctgcatacttgtgtgttcacacagaggtttttaaaaaccatcttctaagtcctaaaactatttttatgaagttgaatttatttaagccagtacaattatgaggtatgcctcctagtacatgtaaataactatctaggaaaggtaaatgtacgccttgacctctatcatagccattataagtaggactttctttttaattggtcttaaaattgcttcatagtaagcgaagctttacagacattttaccagttccagaatcccctagagagaatgtaaattttaagaaaccaaaggataaacaagagttagaagaaaaggaaattttatcttggcttgaattgttaagtcacatatttcagattatgccaatctgtttctctttctttcttttttctacaactcctggatctatttcctgtattcactatcttcacagttaagcccaatttactattgtgtaaattaggtgagcttctcaccagatctctgaatatttataaatactcctgtagtatttatcctttctctcccttttactgtttggtttgttggtttttattttgagacggtctcactgtgtgcccaccttgacctggaactcacagggattgcctttctaggactgagactaaaggcttttaccaccacacccagcctatatcttttgggtttttgtttgggttttattgtggggttttttacttctttgtcatatttttcccatttcctcttcctatactttttgggtgtggaaaggcggaagctatttttagccacattcaagttattagtgtggcacttctttctttgtagattcttctaattctacaagcttcataaatatcctactgcagattcttctccatgtgtttcttagagcgggacagtattctttctgttgtacctacttgagacataaattgccaagcaagttgaggattcacagaaaatatgaagcaggaaaaaagaaaataactattttatattgatacatttagaagtcatctaaaacaaccaaaaaaaaaaaaagtcatctgtgtaatacaatgtttctggagtcattgagctaaattgtgggctatatcacaaaatttctagctccttatgtaatcatttttcctaatatccttttctcccaaagcaaaaaaaagtagtactgctagttttttttcccttgggatagttgggttttggctagaaatggataagcatataattcagatggtacatgagttctgcagaaagctgattgtatgcattaaaaacccacattttgaactggtgtgtgtgtgtgtgtgtgtgtgtgtgtgtgtgtgtgtgtgtagtaaaaggaggagtaaagccgtggtggagcacgcctttaattccagcacttgggaggcggagacaggcagattactcaattcaaggccagcctggcctacaaagtgagttccaggacagccggggctacacagaaaaaccgtcttgaaaaatcaaaagaaaataaaaaggagtaaagcaggacaagctgggtttgctagtggatccagtattctgtagatctggtaggttgttcattgatgggaaagtgaaactacatatttttttctttttcgttctttctttctttctttctttctttctttctttctttctttctttctttctttctttcttgtttttgttgttgttttttcaagacacgttttccctgtgtagccctgactgtcctggaactcactttgtagaccagggtggcctcgaactcagagatctgcctgcctctgcctctggagtgctgggattaaaggcctgtgccaccacgccctgcaagactttatcattttaaagtcctcataagagttcccactttgttaaaaaaaaaaaaaaaagtttttcattaatttatttttcctcccctcttctcctcccagccctactctctcaatccccccttttaaattttatagtcataagaaaaactgatttaagagaaaattcaactcacatgcagacggaaagatccaatcataaaattgcaatttttcccccaacccctttgcaatttttttgaagggtttttgttttgttttgttttttaagacagggctcacatatcccaaatttgcccaaaatttgctatatgtaacccagaataacctggaattctgataattctacctgtacctccaaagtcctaggattatagatagcctcataacaccatgccaaatttgtgcaaggctaagaaaactcagggctttgtggtgccaggcaagtaccctaccaaattatctctttgtacaaattttctctcttaattcagttactcattagcctactaaagaattttcagagctgtgctatatgtgttaatttccattatctaaatacagggttgaacataatgctttcagtaatatatatgtgtaagaaacctgaatcttgaattgtgtcccagtttaaggatggtggttttaaaaagaaatttggtttgaggcttcctgtagttgaagttccctaacctaagtctttaacaaggtgagaaacaatattgtatatgaaaaacccagtacctaaactgaaaagaaattgggcctatgatgacaattctagggaagatttttaaattgaatgtatatttaagctggagtctaagtaaatggattataatcattaactctagtaagatctgaagtcatgctgcccctagaaaaggaggcgttgtacctaacattgtaaagacactttgttaatgtttatcttgacctaagctagagtagattttcttttttctctcctagatgacattgttttatgtactgagttccatgtaatttcagaattcaaaatatacctctctgaccctagattagtctaaatatttatctttatttttgtgagtcataattgagtatcagatttcataacagtttttatacaagaaactattgtgtcccaggtttttcttgggaaactgaggaaaattagtataaatttttactgtaaaggccttatcgttaatatgtttagagaattctgctcatcagagtaaaaatatttttggtgtttcatttgaaatataattatgagtggtggagactttaaacacagttaaaggaaagcagggaagacaaagggctctctaagaaaagggcttgggatgcgtggggtagggatattccctttattttatcagagactgaaatggaagaaatttgacattctggtggcttatggggagctgctcagagattgcttcttggctgagttgctgtctgcaaaggctgctaacaatcgcttgtctggcagcagatcttgttcatcaggattgcatcatctctgggagagtggccaaggtccacagcctcagtacaaagactgtctgaagcatacgaggcctgttctctttctaaagctgcactcttcttcctgccagtcctcttcacaggattgctaaagctgacttgtgcgtttctttcattgggttgactgtttactggtctcttgtctcccagctgcttccgcctcacctgtctgatacatttcttctgaaatcttaaaagtctagaaactacatataaatggtaactctcaaaagagtgctcagtattggaagacaggctgggtttgttagtggatccggtattttgtagatctggtgggttgataattgatggcagagtgaaactatatttttactttgcctctgtccttcctcttacttgctgctgctgaatacttgactattttatttcttctttttactgtcaccttcaaacctttttttttttcacttcaaaattgtgaatatacttttgaaaatatttttctaaagattactttgttttccagatttttaaaaattggaaacatgcgcacgcccacacccacacacataaatgtaaagggcatgccttctaatggatggtgacttgtgaacagctttcttccatgtttatgacctgttattattttggatattgagagctcattttggtcagtactatatttgactttgtgaaataaaaacatgaatttaagaaattctgatcacctactcttccctttcttcattctctttccccaaatttaataggttctctattttcctttccttttggggatatagtaagttgatggaattgaccccaggtagaaccgattccccctgcccccagtttttataaggaatggaatggggaaaagaaaggagtcatcatttaatatgttttgctaggcctgtatccaaagtaaatctggtatttgatgaaaagaggtctgtgccccatgtggtggtgtgtgccaataatagcacttgggagggtcagccaaggaggatacaagtttaagtctgatgtgggctatagcaattgcttaaaaacaaacaaaacaaaacagaaatgtaaaagttactgagtttggaacccccatggaaagacaagaaaaacttgagaatcctgaggggaacagttttgatagaagggaagagaagggcagtatctcatcaccttggaaaccaaggccatttccttccctcccttagttattttgtgttagatgtaaatggaaagtaacaagtaatacagaaataaaattattaatctgtagtgttccactttttgagcacatcaatgtttcttcatatattaaactgtgtctcagccttttctagggtttcagagctactcgcagataattgggggacctcaaaggtgactgccccaaatccttttcatttgttatattttgaattttagtaaatgttgaacttggttactatgatgggatcactcagtaaacatttcttgattcctcttgatatgtcaggcatagtatttaatcattggaactacagcagtggtttaaaaaaaaagttttgttttttaatccctgccataatttgtgttctggtgataagagtttaagtaatggaataaattatattttgaaattatttttgtctagacacagttcttacacatctccaaattaggagattaaattaatagttactctagctaaaatttagcttgataaaccagagtaaatgttttcttacatgagatattataataaaagattgtatatggataatctagtaaaagttctttatcatttaaatagctatattttacatcatttttcagtgaaggaaccatataaagagagtttcgtgtatcagaatttgaattaggaaacctcatcattggggcttgagagataacccagcagttaagagccctggctgttcttccagaaaatctaagtttaattcccagtacccacaaccatctataattatagcttgatgggagctgatacccttttcagatgtacattcagacaaaacagacatttaaaaagaaaccccattattatgatttaggacaacatggtcaagctggcctattaagattgcctttatcagaatagtagcagtagtacagttatataacaattggcaagaggaaaaagaatttacaaagagaaattaataagctaacttcttaatgtttcttaaagttgtgtatcaactgtccagatagctggtgtaatatctcaccactgcatttgagacaagtatgtagtccaggctggtctctcttgaaccttctgccttggcctattgaatgctgggattactgggtgtgtgtgcctagctattgtgttaagatttcataaggcaatgtaaaaataatttattcactcttgagaggaggtactacctgaagtaactttttcatttttgccttgtaatacatctttttttaaagttactatcatagggagaaaattaactatgtgtgtctgtagataataggtagttggatgggtaataattatttttatgaatctatttagcttatgaatctatgttagcggtggctatagcaaagaatcattaatattgttgagtaatttttaaggccttttctgacatagaacacatgatttgaattcttctgagtaatgatcatctgacagattctggtggttatctggtcaaacaacttctaggcttttcttaatgcaaattatctaactaaaattagaagaagtacccttcaaaatgctctttgggtttatttgtgagtgttctctttgttttgccatttgaagatttttgtgtcatttccccaattgcttgggtgttttttgagaattcttgtttagctacttgaggggggatggatatttatttgcaagttggtacaaagacagcaagtggagcagtcacactgatcatgaattgtgtcaagtcgataggaaagttcacttcatttgcattttagttttagttttaacagtgtcaccctgagttggatgagaacaggtattttgccacaccccgtttcaagaggcccaggtactacagaaagctgctttagtttatcgcatcggtagctttctcaagtaatggtgcaaaagtaatacctttatatggtcttaattttggactaattgaccattcagaattagttttcttttgccacattaatgtctcatttatcaaaatgaaatccacatgactcaaatcagtaactatttaaaatcttcgttaattgattttagttggtatcatatactttttgttttatttagctattttttaatagtattgataattttacttctttctttttcagattttagaggcagggtttctctgggtaggtctggctgtcctgggaatcactatatacactggactggccttgaacttaaggattcccccccccccgcctctgcctcctgtgtgctgggatcaaaggcttatgccaccctcaccacctggctgataattatattttacctactgtgttcacgagagtctttttagtctagaggtctttgacattatattgacttctaaacacataaaatgcttcttgtttcatcttttagtgactcttcttacattagtatgaaaccactaatatgaatcatgctaattctgtttttacctccaaatgccttaatctgatttttttccccatatttactactcactgattttttttcttcctaaataataccagtttatggttaccaaatcaaagtttgttcattgctttttttatgcaaaataatatttgtcatacaatgttgtttaggatttctgttacgtacatgtatacatccttttaaagtggttattaaatcaaaacaaagttgagcaggaggtacaagtttctgtatgtcctctatatccacacatacttagctctctccctccacccctctcacacatacttagctctctccctccacccctctcacttacgtttctcttcatatctatcagtatatattgctgcacaattgtgggttttagataattacatgatctctaagactagttaaaagaagtcagagagggtggagaaatggctcagcagttaattaaaaacagtggcttttcttctacaggaccttggattcaaggcctagcacccacatagcagcttacagctgtctgaaactctattctgaggggatccaatgccctcttctggcccctgtgggcactacatacacttaatgtacagcatgcaagtgaaacacatagatttttttttttttaacaaagcaagttgggggcataagaaatggctatctgatcaaacaactaattgatatcttctaccaggtttattttagaagggataagtgagtgttgattaaactatgcttattgattgcctagaagaagtttaagtgaaattattaaggaataatagttctaggattcttctgataaccatcctgaatcttaaaatttgtttggtatatcctagactactagaaaagtgtgtctgctgggcagctaacgagtgaggaacatgtgctttttagtaagccagttagactattgttttcactttggcagaaaagaaaataatgaaaatagaaatttaaaaataatcataacgtttaccaatctcctttgtagaacattagtaaattaaaatacataataagccaacaaacaactttttaaaaaccttatatctattcagggagctagagagatggctcactgtataaaaagcacttgtacaactttgaggacctgagttcaaatctccagtgtgcatgtaaaggacaggagattgttgcttcacatgcctctaaccaatatcagcaggcatagatcctataagtcaatcctaccaacttactggccagcctgctaacccagccaaaacggtgattttgcagtttagtaagagaccctatctcaagggaataagatttgagagccatagagaaagacagccagaatcctcttgtttccatgtgcatacatgagtactctcaaacatacacacttgacaagcatacactgtgcagagacaccacaaacacaaagagtactatcctaacaatacaaaacaccctatagcatttaagataaatttaagaaattctctagtcagtggttattttcattttttgtggcaggattcctcatgtccgtaacatgttggctgaggctctgcagttcacccccactctttgagtggtcagtctccattaattggaccccgtgattcccaccttctgctgtcttggacgtcatgagcattgcaatccctctgggagtcaccacaccagatacttcctactcagatatggctgctggatcagagtaagtggtatttcctagataataggattgctacaagttcgtgtgaggatggatttcttctgggcagttcataagctatatgtaatattttcttaaaacctatcccactaaagaaaacattaggcataccctccccctccccaccccccagttggagggacaaagaaattagaagggggaggaaaggagcttttaaggagggatttctgggtaaatagaatcaaagttgcaaagcagtggttacattttcctttgttttatgggtggggaagattgcaatgaagtaggtgttaccacctccttctaaagagttaattctgatgaagagagataggttttctttccaactgattttctttgaaggcctcttcctatgtacttgtcattattctagaataaaggggctgaaactttatatgggcagactgcttaaccagctcactgtggggtagaaggcatggagagctgtatcatctgtttttacaatattcgttgcctagaaagaggaccttcaaagtcagtggtaccaaacttgtttttcagctaagagcagcgttaggaattcagaatttgtggaaaggcccaatccctaaaatagactcagttctttgaagaatttaaatgccaaatgacaatgaaggtaggccttcattatacaattctatatattattcagtttaaatttttttagccttttgtatcccttctctttaagttgtccaagattgcccccgctcacagattcccccctcttgtccttttacctcccttgtacccaatcttccttgcttacagaaaggaagtggaagccccctacctttcaagacgaagtggcactacaccaggatgtgaaagtccagcgaaagagacccaaggggcctagggggcagcacacccccagaagccaagtctattccaggcagtaccagggattagggtctgggctggaaaaatcctggtgttttgaatatgttcaggtccagttcagactcttgatcccacagccacttcttgagtgaggtgggtgttgctctaattcccgtttctcttgccattttcagtccctgggaattctttccccttcagcaaagcaaagcgactgttccagaattctgggttgaatggcgtcccttgttaatagtggtttccttaaaactgaggatactattaaagagcatgtatatttcttcataaagctacataatgttgatttttattgtgttccttaaagaggaagacatgaaactaccctaggaagtaatatatgatattctggggtagtctggaattgaaagtcatttttaagcttattcccataatacaatgggaggagggagggcataggaaagactagttgtctttctttattatagtggtttttgttgttgttgttgttgttttgttggtgtcatttgggttggtttttgtgtgtgtgtgtgtgtgtgtgtggtttggttttggttatggtttctgcatgccaacaagatttagttaaatactattagctgagacttccaattgtgtaatttttctctaaaataaagtacttaaaactcttctgtgttattggatagccagctcaattgtacagtggttataggtctttataaagtcagaaaataacaacctactgcaatgttaacaaatgatgtatcagtagaaagtactaatatatatgaaaaataaagaggctaaacaagtaagtttggaattggtaggtaaggaaaaaacctaaaccagttatttttaaacagataatttcttcaaagtataacagtagctgcacatatggtctggggaatcgaggaataatgcaagaatgaaagtagcctggcctgtactacaactgtagtgctgtgtcctagaactttctaagcttctcattcattgtctgcagacaaaattctgataactatggtcaacaaccaatttcacatttcttgttgattagttttacaaagggtattaatgtcaataattcagcttatttgctagtcttactaattattaatgatatttgtccttacttcatcatgtctaaccattgttccaagcattctcaagattaaatgtggtattaagggcaacatagctagccaaggaagaaacctataccttgccttctgaaattattaactcttgattgtagtagtttacattttacaattatatataccaggttacttgtagggaaacttgtagatgtaacaacgaccataaaaagatcttttcatctcttgcatgaccaaaaatcagttactttctaagaggtggccttataagaggctgcatattgctcattgaacataattgatgggatatatttgttgtgagcccaatttctctgtgtatgcccaattcttaagacattttagtcacaggaggaaaaaggataatcatttgcataaaatggttgtctaataaagacatgcaatactaatacttttttgtgtggtttttttgttttgttttgttttttgttttttttttttttagtcctgaggcttgaacccaggtcctcacagactaaacactctatgactgagctatctccccatatcctatactataaatttttaatctatattttaaaatactcataaaaatcattgtataatttctaaccaatgtagacattgtaaagtttcctcatttaatctaaattttagattaggtacgcataacaatattttaaatggctgtgcttgagcttgactacatattatggagcagtaggatggcctgttaacctccacaatatacgttttatttttattccctagacttgcacatgaagtgcatatgttcatatttacccagtttggagatgggtaagatataaccaacatagctccatctccatggccatcttttatttcatgcaactttttttttctgtcccacaaaaagcttcatttctaataaacaactttcttatttcaccccatgtgtttaatggtataaaatcccctacataaaaatatgtacagccctttgaattacttacctagtaacatacatagtcaataacaatgtataaatccattactttcttttaactgtccatcatagaaactaaattctaccttcattttattaatgcttgtctgcctttggtttcatttaggaaaccctacctgtttcctaacactcagccaattgcctcagtgacccatgttcaaatcatccttttctcaagaatacttacctgcattcttgatatccccttccagccaccccactgccaattcccaaagtgcatgcacctcactaacagagaatactttcctctgtctaagttcctcacctagaaatgacctttgctgttattaataagaccccttctcacagttgtggaccataaaactaggtgagttcaatacatatctcagagtcttctcatccctcatgtctcagttcatgtgctaccttgaattgcacggtttattcctgcttagttttgtgtgttttatgtatcttgaagcaggaaggtagttatttggaacaaactgaattaattgattagctaaaaccctttgatctctggagttgtgttaacactggtgttgctaatgggtgaatttgttctgattaatatacattacggataatccattcttacttctcccaagtcatagaattacattccttaattattcttcaaaattctataaaaccaaaccaggtaacaaaagtaaagaaacaaggaaaaacctattttatccttggctatggatgcctttttttttttaatcaaataaacttacataaaatttataaccttgaatgtgaaaaaaaaaaattctgggcttaaaggcctcaatacagtttatagatagaatgttatccttgctttcaaacaatgcataatgggaaaggaagaggctttggagtcaggcaaacaactttgtttcaaatcctgactcttatcagcatacgtgcttagaaaaatcatgtaatctcaccaccttagcttcacttccctctctataaaaagggggtgaccatgcttaataattgcaggtattaaatgatttaatacatgtagacccaagtaatagatgattcataatggtagtcatggttactatttaatatgaagcaaatttaactcccaaattcagttttattttgaagttctatgttactgtcatgcagctgttaaacaattgtgtccttgaatatgcttgcatgtccttggtggatgagaaattctaatatgtgaaaggtatttgggggttcatcaagatgagaggtgtgataaatataagatgccattgtttttgcctgtactttcttcagggtatcctgtcttggtagtgaatggaagagggcctggtccctggggcagtgcagaaggcactttcatcatctcactcactgcaaatgtcatgtgaggtttcatggaagtattaagagatccaattaagaagaatagttctgagtctaaaccagcccagagtggcttctctaggggaaactccccgctctgctggtacgtttgtgtttgtcattagggacaccttgtatcccaggtgcctgccttgagacatctgcctgtactggcttcatgttacacacaaatccacattcaataacactattatttataggcgtagttatgttaaacagactttcactaagttcttattctagtggctggtggttgtggaaagagaagggattaggatgggaagtgaactgttagtttaagggaagagtaggtgttatgctatcatgcattgcttttcgcctttgtgcagccctgaatctgtggaggctagtccagcagttaatgagaagagcgtgtattccactcataattatgggaccactcagaggcatgggtgtcgaggactgccttatgctgtgagtatgcacttgtttctctccagagcagtgatcttcttggagtgtaatccattcttatacattgtgactttcttgaaatgtttatatgcagcatgacgaagttgccccttttgcacttccctgcctccagcggacgtctagccctgcatcattgttcttgtttttatgtcccagttgaccttggcattttgttttatcactttcctggttgaagccaaaaaacgaagggtactactttcttctttctttccatatgtaccatactttaggggagagaggggccagtgtttggacactgttgatttaaaaaatcttattttcaggatcataattacggagcccctcctcctccgacacctcctgcttctccccctgtccagacgatcatccctcgttctgacctgaatggcctgccgtcgcccgtagaggaacgctgtggagacagcccgaactctgaaggagagactgttcctacctggtgtccttgtggtctttctcaggatggcttccttctcaactgtgacaagtgcaggtaagatcctgtttcatctaaattcaaacctgggttgctgggattagggtttcttatcagtagggaaaagctcaaagtatttcttcttgtgtttgttaatgtagatgattccttagtgctccttggctcgaattctctgcactaggtgagaattgctgacaacaaggaatgagagattgatgttaaagctattgaatttgataagaaatttaatgtcctggaaacatttggtaggtgggagggagggggtagtacatacgcagagacacttctcccatgtatgatgtgctgtgctgcatgctgctggaaggactactttaagtttattttccctctttaggggaatgagcagggggaaggttattagacttcatcggcggaagcaggacaacatatcaggtgagcagaaggtgggttaagcccacattttgactaaatattttgatttaaatgttctcctatagtacatagctattttcacacaaagaagttccaccaaaaccactgtatctatctggaaatgtttcttagacctctaacagtcaaattatcctttgtaagcaccagaaataattttttttttctgttaagttacccatttatagttaaagacagcagagtgtggaaactactttgaaggggaaaaattgatggaatacagactaaatcttacttcatgccaacaacaacaacaaaaaatcttgttttcagaagaaaggtgggggtctatgtagagttatagtagaggtaattttttacctggtgtagggcatatggaaaggaggaagaagatgatattagtgcctgagctgtgtgatcatctttttttcaggtggggatagcagtgcaacagaaagctgggatgaggagctttctccttccactgtgttgtacacagcaacacagcacacacctacaagcatcaccttaactgttagaagaaccaaacccaagaagcggaaaaagagtccagaaaagggtcgtgcagcaccaaagacgaagaagatcaaggtatgcaaggtgtataaaaacaccttgaatacaagtatgtctgaaatagctcaaacatttgattcaagcaaaaatactctaaaattctttgaagaaatttgatgccagtgtttggccactttttttctactttcaaaaagtcacctgatcaatatatacaaacagaacaaactctcttctaaccttcgtaaccatcaccacaggctcagtttcttctacttcaaccaccatcccaggtatggaatgccagcccttgctggtaaattctcatgtgagatacagccttgaatctaagcttccactgtctttgcagcatctccctacttctctgtcacaaagcagtctgaagttcttgtcttgtttacatggctgacctcatgtcattgaggtcattaggctgattgattgtcctatatctaaacagaacaataacatgaggaaatttatcttgaatggtctagattttcttattgtcttggtcacttttctatactcttagataaagggtctctagaagaaacatttgtcttttctattctttcttccccatcacagcaacttggttgctcctaggtcacttgcccaccctttgtgaaggggatcagtctttgtttccttcctaatttcaaaactaataatctgcaacttgaggattataattactttctgcttggtgtcagcagtttgtatagtctataagtggtgcatgctcttacctattaattgtctcataccatcaaagtattggaattcatgtccgtgttcatgagcctttgaactgtcctttttcttgatcatggtttgatgtaccgttgtatttgttacactgaaaatgagacagcataggatactggttagtaccttacttagttttagtcacatggatataactgtcattcttggtaccaagttttgttttgttctacttgttttcctctttgggataggcatttcgagagggatcccggaagtccttgcggatgaagggaaggggtaaacctttcctgatgctgcattttacatttggtcttgccttttgatggcttctttcctaacgttgatggtctgagactcttggagtctgcttttcacaaggttgtaatgttgccattcagttttcataaatattttctccagagtggactttcttgtctattttatgaaatattttcatgtttctgtttcattgtggtagtgtgggagataagtcacagtttttaaaaacaaaacgaggctagtctgttttattccagtgattggactcaacctcaggagtgagaattttctggtgatgagccaggctctcttgtaaactctccttgacaactttggctttgaattattgtttgaaaggataactctttagtagaaaattggtgttgttaatatgtgatagtcttactgaaaaagcactatttttcttggcatcttttggcatttcttggcatctttttcttggtggagatttatgtaatgctgcttatcaaataggactggtgtgtgtgtgtttggagaagtaatgtactttttagatactggctgggtttcgttgtactggttagttttcaaagatttggttgtcgtttcttatatcttcttttgtcctgcccatgagtaagttgacatacctcctaaaagtttaggatttaagagctttagtttgaatttgagttgtactttggttcttctaagtattcgtatccctaaatctcttaagttgtccattaaataaacagtgactctttgagttaggataaacttattaggattactttgtagttggagcaccagtggatgttgtcattgatgtcaagtgacattttaccttaaatttgaaagtctgacctcttatgtggataggagattctttaatgagataaatctacaagttgccacgtgtattttcaactgctcgtttcattttatttcatttactaacagggaccttacatagaatttggggactaactttagacctaaactgtaaggccctcttttttttttccccctgctatcaactaatactataactagctcaactttcgatacctgtaagcaaaatgaaagccatctctttctctcagagaagtttatatacactttttgcttacagtttcaacagagccttgtagatatgttaaaatttaaataggaaaaaaaaaaaggttttactttaattatcttataatttttaagttaagttataaattttgtctttggaattaatgaaaactttcataaagatacaggtagtagctataggaatataaagagaatagcatttgaatttttaatctcaaaaccaagagctttcctacaagacacaactcttagccagtgttttaggtcagcaaggtgagtgaacaggtaaaggaacttgctgccaagcctgacaacttgagtgtaatccctggaacacttttggtggaataagagaattcctacaaggtgtcctctgtggcacaggcataccagcaaaatatatgttaaaaatagaacaataagtaaaccagtgtatcttcaatacatttggataagtaattctgtgtggtaatttacataaaatgatggaacattattcaacgtgtatttgataatggttccaaatggtaatttccctgtgagtgttaacattatgaactaggtattgctattagaaataataggtgtctcagaaacaaataggtgactcattctcctaatacaaatacaaaccatttttactgctatactaacacagcgaatatcagcctattttgaaattttatgcactacaacaacttaaaattcttttttgtctttttatgactcccccaaggaatttgatgtcaatctttctttcttttttttttctttttttttcttcccggtttttggtttttcgagacagggtttctctctgtagccctggctgtcctagaactcactttgtagaccaggctgacctcaaactcagaaatccacctgcctctgcctccccaagtgctgagattaaaggcgtgtgccaccaccgcccggctgatgtcaatcttgatggattgatctttactactgaaaatggtcatgaaaccagtaatggatgaagatactaagtcagattactttctcactttataattagacaaatgaggaaatcatttgaaggtgtccaagacctcataattggttgatagtagaagctaaaacccctgatttcagtccattgctcttacactacaccaactgtcaagtaaaaacaagtatcttgcttatcctgccgtgttcatgaatggtctcttactaattcacttatctttgatctctacagaattctccctcggaagcacagaatttagatgaaaataccactgagggctgggaaaatcggataagactatggactgatcaatatgaagaagctttcactaatcagtacagtgcagatgtacagaatgcccttgagcaacatctccattctaacaaggaatttgtgggcaaacctgcaattttagacactattaataaaactgaactggcctgtaataatacagtaatcggttcccaaatgcaggtaagagctaaagctttaaaagcactaagagattgaaattactttaataaccaaagaaccagaatggaacaaaatcattattccataccaaataacaaatgaactaccttcctgctgataatctctgttcaaaatcaggttatagtaactaaactgtctaggcacatgtttgagaaataaaagctataaatttataaagcagacacagctccactgacatcttaagttcttctttgatcttaccttctctgggaccactaattggaacatgtttcctggaaacttgagattatgtcaaaaagaaaattttccaatcttcaacctatttaatacactgataaaacctgaaagtgttagtacctttttaacagttatgaaacactgtaaatgtttaccacactgctattgctattcttaaacattaacactgtttttattcagttacagctgggaagagtcactcgtgttcaaaagcaccggaaaatcctgagggctgcaagagatttggctttggacactcttataatagaatatcgtgggaaagtcatgttacgacaacaatttgaggtcaatgggcatttctttaaaaagtaagaacatcatttgttgagcattgagggcttgcatggttctgactgacgagtcattcaaataagctcgtgttttgtctgtttgctgttgattcaaaagggcaaataaatctgcaaatcgtgtatgtacactagtgatgactcctttccaagcccaacattccttgctttttgcttattcattaatgaaaagcagacaagtctgtggtgtttgctaccttaggtattgcaaatgactgttccttattgagtcagtgtatacatcacatttgtggggtggcccttttgtttgtgttgagaattacaggaattttaattatatccctagaccatatccctttgtgctcttctactcaaaattcaatggtgtagagatgtgtgtcgatgctcgtactttcggtaatgatgctcggttcatcagaagatcatgtacaccaaatgcagaggtaagctatctttagcaacttccctttcaatggagccatcaaaggacatgtttaattgaagaaacaatctgaaaacttcacccagataaaggtctgtagctaatagttgtatgatttttaatgcagagatgaaaaagtaaaagtgtggtgtcttatggagatggaataaagacaagaaataggttttctttagagaggacagaaatgaaaaaaaaaagaagtaataaaacagactggataagatgtctataaattgaattggaaaaaatttaaaatattaaaatgtcatgtggtaatagtttgtctttgctattgtgggaaacagtggtaaaaatttgtaaacatttctaaagttcattaatcgatgtattcacagtaagtgcagtaaggttaacacagctttgtttccaggctaaggaatttttaattctttagcagaatgcagatacttttaagaataaaataatagtttcacccttttctattttgaagaagtttaacagattgttcactagtgtattatcatgaagtgatagaggtaaataaaataacagattactcaaaataggcagaaattatttgggtcatgcttttcccatttatggaaaacttggttttggttttgaaggcaaacataatgatgtcttgttcatataggtgagacacatgattgcagatgggatgattcacttgtgtatctatgccgtatctgctatcaccaaggatgcagaagtcaccattgcatttgattatgaatatagtaactggtaagacctcagaaatttttataagcatagatggccttaagattttaatatcttaatattaaaattgtttttaaatcttgccctccttttttttttaattactgtattttttgccaagaatctgtactcctactacataggaggcagaagcatatggatctgtatgagtttgaggtcactaaggcattccaggccaaccaggcccaccaggccatgactctgaaaagaaaaataaaaagcagtagggagaaagaattagtcgaggtttgtgttcttcctgattctgtgctgcataggttagaggtagacatatacagaaaaactgaaattttgaaagtattataccaattctaatttatttaacaataacatcagaggaaatttttataccagtttttcaataaggcgaatagttagtatgccataatattctgtttacaagaatactgagatacttatggttgtttctttggcacagtaattacaaagtggactgtgcttgtcacaagggaaaccggaattgccctatacagaaaagaaatcccaatgctgcagaattgccactcccacctcctcctagctttcccaccattggagcagagaccagacgtagaaaagcacggcggaaagagctggagctggagcagcaaaatgaggttccagaagagaatcctgacccgcaaccacaagaagttccagaaaaagtaactgtatccaatgagcatgaggtaatctctgtaaccaagtcaggatggtctgatcccatgtgttgtttcagagagctatactaaaacattaactgctattatacacatcatcatgaatatacttacttagattttcttttcactttatgatattcagaaccatgagcaaagccagggtatagtggcacactgctccagtattcaggagacagaggcaggtgcatctctgtgagttctaggaaagcccaggctgatgcacaaagaaaccttgtcaaaatataaagagagggagggagagaaaggaaaggaaaaaagaaaagcctaagacctgattcagaaagaaaaataataatatcagaaaccatccttttagggcctggtatggtgatactcacatctaatcccagcatctgtagggctgaggctgggtggttatgaatttgaggctaggcttaggcagtataataagtccctgtctcaagaaacatacaacaaaaatagagcatcctttgactcacagatcacatgctttgcacacagaaggacctgggcttaattcctattgtagagcataaaaagaagtggggaggtagtgatgccagaataaagcaggttgatgctcagtgtttgaatatgatctaatagtgcttctgtcttaaaggaagttgacaatccagaagaaaaaccagaagaagaagaaaaagaagaggctacagatgaccaggagaactctgctcatagcagaagggtaagtcctgtccagtagatgtctctgtactttcctaacgctgaggttttaccataaagtacgtttcattacatataggcatgctcacagttgtttatgataactatctgttagtggctttaagatatttccttctaacaactggatttccctaaaacttggtgatgaagaccaaagtttgttggcttagttttcttactttgttttgtgtttttatatttaaaaactaaaatcaagaagagctgctgatagcacagttgtatagcagcacaaggtcttgagttcgatcccaaattactgggagaagaggaagataatcagcactgtgagcctctgtccctgtgacagaaatgctgtgaaaaacaacttgaaggaggccaagcttacctatgctcaggttacgcaggttcaggtctgttgtcttcattgctttcagagcaagccgaaataagacagtaggagtccactgcaaagaaaatctgcttacctcattgctaccaggaagctgagaggaaaaaaagccaagaggccaaagatggaagagtatattctatacttttccatggcacccagtggcttgcttcctccaagaaggcgcagttcctggggtctccacaacctcccaatagcacttaccacatgagttctgagcctttaactgaacttgagcctttggggcacattcatatccaaactgtagtaattttttttttgtcagattgattaaaaacatttgctaattgtgttcatttgtgcttagaaaaaatttaatgacaatttactttggttttgagctctgaatgtaggacagaaattgcttgtcgttgctttatgcactaaaatgtgttgaggtagctcacctattttaaaacatttagttttaaatttctgctataactgtttactatatttaaaataattttaattttttttatcttaaagtttagtgatgcatatgctatcttaataatactttgaataaattcttataaaccctactaattttacttttgaaatagcttctggttgatgctttttttattgttgtttttaatacttttctacccccagactcgagaagaccgaaaggttgaagccatcatgcatgcttttgaatctttagagaagagaaagaaacggcgggatcagcctgtagaacagagcagctcggacatagagattactactagcagttcagagatagtagttggagaagagacaaaaactgcagcccctgagtctgaagttagcagccctgtttcaaatgttgctatcccaagcaccccacagagcactggtgtgaatactcggaggtcctcccatgctggggtaagagggaaagctctgaaaagtcctgcgtatgctaatgtcagttgtctttttctatagtggtagaagttagtattttcaacgttgctctgtatcagaataagcaaagctattttgatctcaacagctggtttgtgggatgcagagagacaggtgaggtcaacatttgaatgacaaagtcccttagcacttaagtgtctcccagataagttcatagaatcctttggtttgggagaatgcatactgagcacgaaggcttcacctagctcagtctccatctctaagggaagaaaccaaatctttgggtttctctcactgattctctgaatagctcaggtacatgactgaccttccagggccttctcaggactagtgtttaacataggacttctgggtgtagaaaagaaacaagaattatcttgcctaagaaccttaatattaggtacctagctttaattggcttttgacctattttattttatacatgtttgttagaaatagaattaactaaggcagatgtttgtctatggtctatttaggtaataaagtctataaaattttgtattttttttaatttgttttgtgacagggtcttcccatatagtcctcctggctggcctgaaacttgctttgtagatcagattaaccttaaattcacaggggtctacctgcctctgccctctctacctctgattccacctcctgaatgctgagattaaagataggtgacgtggtgccaagttcagatttatttatttttatatttatgtgtgaacagacagacacacaccttcttacatgtatgtatgtgtatcatgtatgtaccctacccacagaggctagaagatgggattggatccccatctaaaactaaaactcctagttagaggactttgtgaacactaaaaactgaaccccagtctttgctgcaagagcaccaagtggtgttaattggggattaatcttccagccttaaggattaattgaaaatcatttagaatgctttaaatagatagaaaactaagaaacaggtaagacatttctgatgctaggtgagaggagccttgtctaatcctagtactcagcaaactaaggcaacctgggagatcctgtctgcaaaggagaagagaattttctagtaaacatttggccttgatattgttacaggatgtagctgcagaaaagccaatccctaaaccacctccagctaagccttctagaccccgaccgaaaagtagaatttctcggtaccggaccagttcagcccaaagactaaaacgccagaagcaggccattgcacaacaggcagaactgtcgcaagctgccttggaagaaggaggaagtaacaactcagtaactcctcctgaagctggaaatacagacagttcaggagagaacagacagctaacagggtctgacccaactgtgatatcagttactggatcccatgtcaaccgtgctgcatctaaataccccaaaaccaaaaaggtaagcgacgatataaatttcatatggtaaggagtatcacgctaaagcaagagggcctataatccccaaggaagaagtaaccttagaattattagattgaacattttacgtaaaaagttgtttgtgctggaagctgaaaccatcctacttatttttgttcacttgattttagacagaatttaaatcactggtaaaacactatttttatctgtctttgtgagcatggaaaatgtaaaggaaagataccttatactctgaatgctcagctcatcttcactgtggttgctgatctgttctagttttagttgaagtttgatttgtgaactacactactgcttctggcagctgttacaaatgcagtgataactaatggtttttgttttgttttgtttttttaaacctttagtatctagttacagaatggttaaatgacaaggcagagaagcaagaatgccctgttgagtgtcctttgcgtatcaccactgacccaactgtgttggcaacaaccctgaacatgctaccaggtcttattcattccccattaatttgtaccacccccaaacactacattcgctttggctcaccctttatgcctgagaggcgtcgaaggccccttctgcctgatggcacattcagctcctgtaagaaggtatgtgcctttctgtctgtctctatctatctatctgtctatctgtctatctccccctctaccccccaccccctccccgtgtgtgtctgtgtgtgtatacctgcccatgaatgaaaatatgtttaatactgtagggtgcatatagttgtagtatattttacataattgtctagataattcgagaatctctagataactttgtgagtttatattgtgttgttaaacatggaagtagactctttagaagtcactgtggtcaagttggaatgtatacagcatttttggtgctcaaacttgtgactgtttacctgtccatacctagaagcttttcacattactgagagcacaaggcaattgatgggatggatgtgttttgtatatgcttttgtgatactggttagcatggtaatttgtgactattgtatgatgttggaccccaaataattagagaacagttatattcataaaagcagataagattgtcgttgtaactatataatcaattactattatttcttaaaggagtttagacaaaaaattatcttagaattttattggacaataaaaagacttattccctgcctttctgggactctagttgttttgggtctagcaccagcaatgtttggtagttgttttgggaatgcactttattaattcccacatttgtacacatgttccaagggtgtcttgggaatagattgttcttcaagcctataatgctcttcaatgttttcagaaacacagaacacactttatcaggtcttcctttaggtagggttcttttccctggaccacccttttctctgatcctcagatcaggattcaggctgccgccctcattgtctggccttgacctcttcctcgggcatcacatacatgaggatgctgcatgtagcttatttgatgtgatgaagtttccaattccaggcaggtcttccctgattcctctaaacttaaaaagatttttttctttccccaagatcataagttacttcttggggacgggaatataaaggatcaacagaatgacatggcctattgaaggggagcaaggaaacgggagtctgcatagggaaaggcagtgctgctgagtcagtagtacattgcagaagcctaagtagcacatcctataaagtactgcacttacttggtttgtatggggaaaactcccaaatggaagattttctgagaaattagatttcaaggtccttgtcaaagagattttggataatgcagtaagtaacttggtgaaataagtaataacagtagaaagattttgaaaatctgatcactataggaattttgtctaggtaatgaagagctgggtctctagggaattcacttataccactcacttagcttctcttggatcttgtgtttatcagaaaaagaaaatggtttgttgtacaaaaacaccattacccatgataaccaggtatgatagtcatgttacatcatacagtaggccaagacaagggtgttatattactagcctgggctgcaaaaatctcatctcaacatctagaatggcaaaacagactcagttcttcagtaagtaaaacaggaagctgatgtgatggctaattaggcaaacacttgaattctatcccttgactcatgtaaaagtggaagatgacctgttgatgtagttgtcctctaacatccacaccagcatgaaatctgtagtcccccgcaaaataatgatttcttaagatgtaatatttaaataatagcagaatcctagctgcttttatgaggagtgttaaaagttagaaaggaccctgtctctccctaaggctatatactcagtttattatgggaaggatatattcttcagtggtaagaggtactacactggtaagatactcttgtgaacaacccaaatagaaactctgcttattaggtttaaaaataagaaagtagagtcattggttataaaaagggaagattagagtgaatgggaatgggagaggaataagaaagaatggaaagggcataagtatagacaaaatacatgatatgtgtatatagaaaagtatgagacccattggatagttagtatgtgctaagaaaagcaacttttaaaaaaagaattattttatgtatgtgagtacactgtagctctctccagacatcagaagaggacatcagagcccagatggttttagccgccatatgatttctgggaatttaactcaggatctctggataagcagtcagtgttaactgttgagccacctcttcacccccaaaaagcaaccttttttttttttttttttaagacagggtttctttgggtagccctggctgtcctggaacttaccctgtagaccaggctggcctcaaactcagaaatcctcctgcttctgcctctcaagttctgggattaaagatgtacaccactgccctgctcaaaaaacaactttttaaaaagaatattggagtgtaaagcatttttatcaaggcagtaaaatcaggttgtaaaatctatcctgatgtcttaagaagagttactgggggctttggagagacgcctcatcaagaacacttgctgctcttgcagaagacccagatttggttcctagtaactacatggtggttcacaactgctgtaatccccggtcccgaagatttgatgagccatacacatacatacatacatacatacatacatacatacatacatacatacatacaggcaaaacggtcacataagtagaattaatctttttttaaaaggagcgattgatggtaatttagcagggattaatataaagatcgttataaagtggactaacatttgaaatgccttattggtaattatacagaattgcaatcttttttttcctttcttgtttgtcgaactagcagagagccaagcaaacaaacttgtgtaaaagtataacttacatagaaaatgtacttgcttgagcttttgttgttgttgcattactatgtatagggggaggtgattcaaagtatcaaaataatccaggcttatctgtatatctacatagagtagattgacttgagactcgtggagatctgcctgcctctatctcttgaatgctgagattaaagacatagaccacaacacttggcagttatatatgtagtatctccattggcaacccatagaaagaaattgaatttaactgaactccacattgcattctccaagactgtgaccagtctcctacttagttgtctcccacacctctttttttaagcagggttagaacaagctggataagcactttaaccaccgagctatatcttcagctctgtatcaatcactatttttagaaagagactatcatagaaaggctgcctcattaaaattaatcttaaaattgttatggccagtgatgtggctcagctggaagagtgcataccattcccaatggtggtgggggtcctcataaaacttagaatagctgtggtgcagatttgttgtcttagccttgggacaggtggaggcagaaagatcagaaatttgaggccagtctcataagacccccttaccctcccttcctaaaacccttatttacattggaattcagtttaaattgctgctttaatatttcctgagaaaaatccagattagattatacaacataaacattttgtgggcggggcaaactaacctatttttttttaaagctagaaatctgagtcaactttttcttgggtatgagcattttacctgcatatgtgtaagtgttaccacatgcatgcctgggcattcagaggccagagttgagttggagtttgagatggcctctatatgggtgtcagtaaccaaacttaggtcctctgcaagagcaacatgcactcttaaaccactgagccatctccaaagaataatatatattcttactaatagacctactgtttcatatatcattgaaaaacctcctaagttaaaagcagtataggacaagtttgtgtctatatgtttatacccagattgttcacttgtgaagacatttattaatcttccaggagtgtctaaatttaattaatttgagatagatagacacaaataaattcatgtctcctggtttttttttgtctttgttgtgtttgtttaaggattttttttttatatgagtgcactgtagctgtcttcagacacatcagaagagtgcattggatcccattacagaaaaggttgtgagccactatttggttgctgggaattgaactcaggacctctgaaagagcacttagtgctcttaaccgctgagccatctctccagccctgttttgttttataataaacatgtaagcctttagtcagtgtccctctgtgttgtgtataaagtcatttgaacatatggaaagaatctttggtgtcaagattgcttagaaagttagtgttgtctgcactgttgctttatttacctttgaacataaacatactgctagaattagcagggagaggtgattaatagataagggagtgagtatatttaaaatagataatatattcaaatgcacttaaatcattaacggaagaagttgaaagtttggagtgttgaaatcattggctactgtgtataaaccgagtctttttgtctcgaccagaaatgggttcagaaacttgcccaaagtaaagcatctctagtaatggggagagcttgtttcctaccaggtcttcacattccaaagcttagttagttcactgttctccctcattttcaaaaatgcctcacctaccttttgggccttctaaaaacttttcagtatattttacagaaaacagaattgttttcagacttaaatattttctaaatagaatttgcataggagaacagaataggaatttgaaagtaatcttttatccatagaaagaagtggtcatgttccttttttatgaatcttaaatattgtttaaaaaaatgaatgagaggacactgaaaaaagggttacttgatttgactctgtttagccttagagacaagactggtgacatcatctcagtgccccatctgcttttatataagctcttttttttctagtcttaagatctagaatgtcaacacttatatggctttcttacactaaaaatattttagtgtaaatgttttttccttttctcttttcctttctttttttgagggaactataggaatctctaatttgagttcctatcttctgctctaagtggaaaaataaattgaaaataacctgtatataatataaattttaaaacttgcatattcataactaaggatttttcatttgtctttccaggctaatatcccctacccgtgagaaagggctttagaccaagatgacctcagagggtctgtgcttttgatgacctgtgtgctaagactgtgtaagagagcatatcactcttggtcttggctttttagacatcttgtcatgtcctagaacattgatgtgattcaaatgattcttaattttatttatatttatatatacagatgtatatatacacatagacatattcatttacctctgtttacgttctccttcaacttagtaaaccacggatacttatgtaatagagaatttttcataataaaatttccttgaaggcttcccaggttctaattaaccactggctactaatcttctataactactctgttgagaatatttactgacctatgttctctaaaggtataaaattatactaatttaccttttcctatttggagacagtctgtctgaaattaatgtttatcaaaattggaagtgtcttatgttaggataggagagctacagaatggtgaacaacttaaaactgtgtcttttaaaaaaaaaatcacatataataatttcttttccacagaatcctaccttgtaatttttgtaagcattcttatttctcatccatctagattacatattagcaactaaaaaaagtaagtggagagaattcttgaaaaagtttttccactttttttttatttcttcagaacctcttttttttttttttcccctctctcctctcctcagtgatctgcagttactggggcataatttgtgcttgagataggatcccacagctttgggagctttgcctagtagaaacactgacttgactgtgggaaatggagcttggttgatagaatccctcccttggcccagtccctatcaccacatacataaacttgatattgtggtagacacctacccagaggatgaagcagaagcatcattatcaccacatacataaacttgatactgtggtagacacctacccagaggatgaagcagaagcatcattatcaccacatacataaacttgatactgtggtagacacctacccagaggatgaagcagaagcatcattatcagggtgatctttagatacttaggatgtttgaggccaatctaggttacatgagactatttcaaaactaatcttcattaaagagaagggaaagaacagccaaagccagccttggctgcacaggcccgaccctgtctagaacctatgtgaatgtatttgtattgtattactcaccaattaatttgtaatgatctggttagtgcactgaaaatagatatcttttaaatggttattgaaaattctctgggttttccctcccattgtagcgctggataaagcaagccttggaagaagggatgactcagacttcatctgtgccccaagagactagaacacagcacctataccaaagtaatgagactagtaattcttctagtatctgtaaagacaatgcaggtatgtatctgatccttttctaaatttgataagaacagtcaccatttgaggttcacagtgaaattttcagtgttggttctctgatataaaaagaaatagtgttttctctaaatagttaatttacatctgtctttacagaggaagagaaagatctcgagtcagggatcagttttcccaggacgacaaagaaggaactagacagtgtacagataacagcagaaatggttataaaaaaggttagatacgtttaacgtagtaagtttaggaaatatttatttgtacttataaggggagacagtagaaagtggtggaacactttcaaggggaacagttggaactgttaagtggcttgttgggtgggatctgactaaaggggcaggaaataatggcatccttgaggaatcattgttgttttgttttttttcaaaagaacttgcctcccagaactataaaatttctgactaagacataaagatatgggccaaatggctatgaaaaaaggacctgatcattgtcttttacagtgttctgtttcagacttctagctgaaattattggtatattgacttatgatatcctatttgtttgtttacttattagacagggtttttctgtttaatctaagctggtatcaaacatcctctctggtactcaaattcggatcagttttctgaatattgtataatcaaaaaatgctgtaactggatacaatgatacttaggatcctagtacttggaagacaaaataagacaagaggattgctgcaagttcaagaccctccctgtctcaataagaaacaacaacaacaaaatttaccaacacagattagttactaaaactcacttttagttttgctttggtttattggataaagagaggtgtttgtggggtttttttttttaaaccaccattttttgacttgctgagtatttatgaagctgaatttaaaagaattttgtaagtaattgctttatattaaaattcttaggttttaatctgttcacctaatgagacagattcattcaggtttagtttaataaaaattttaaggcagctttgaattgtgtcaacttacaactttaagagtagctgaattagactatggtgtgtgtatgtgtgtgtgtgcgtgcatgtacgcgccttcctctatctggtgggtatgttgcacacatatacacatatatagttgatttggagaacagactgcatgtcctggctgtcacacactcagagagaacttgtccttgttactacataccctcagtggaatagaattagcactgttagtcatcaacttgtattacatttctattcttctctccagcaagctgtgagaaacattgttagaaaacaccttgcccttaagtatcaatataaaccaaaggaaagcattacataaagagattaatggcacagaattactgtttgttgagttttaaaagttttgtttacaacaatatggaggaaagttgatgaagaaagtgaagagatgtgttgacacagataaaaatatcaaatagacctttatttgaggtctagttttctatcctgtgtgatgttactaaatgtctctgaatttcacctgtaagtgcctgcttcataaggttaataagaaattgaataatttttactaagtgcttagttcagtatcagacccatatctgaattacggctgtcattctacatagaatactctttcttgtcacatatgaactacctagattaaagatgataaattcttccactggtgtggttgtgcttaatgtgtacaataccagtaatcaagactgatggaaaaatcttggttttcaggccagtctgggctgtatagtaactctatcacaaaaagaaaagtcaaaggatattaaaagataaaattgaataaaaataagatgtattaccattgacataaagaagagatcagatattcatttgtaaataacatgaatatatccctagaaataccttaataatcaactgaaaaattcagaactaataacagttgaataaaatccttggttagaagtaaatatcccttaaatacttaagaaaatgaatgaaaacaggtttttgtcatcctcatttttagcaaagctaagaaactacctgagaattttcatacttggatatgtgatgcaaactattattgagaaatactttgcaagtttgagcataaaggaaattctgtattcaataattggatgtataatattctttctactcctatggtttcctagagccatctttaaaattttgattttaagttcattaaagtttttaaaataaaccttggaagggtaataagtactttgctgaaaatacacacctagttttcatgggacactcgtggttaaattatcatggcgaatgagaatacggaactgaatagctagactaggctttgaaataggggcatggtaaattgctctaaaaagaaaattgctttctaaaaagaaaagttttcagttacttgggagattgtaaagtgattggatcttttgccaatgcaaattctaagtgaactcaaatactttttcttacaattttttgggttctttgtgttttgtggttggtgtgtttgggtttgtttcttgagacaggttttcactatgtaatcctggcaagcttgcttgccatcttcctgcctcactctcctaactgcgtgtaccaccacacccaataccctaattcaaatagtattaactcttgtttctgtgatcatgctgactttaagttaatatagtaagaaaggattttcagtaaaaaaaatatatatataacaatattccaattgtctattcagattcattatgtgctttaaagatttattcttaagctcactagttctagctattgtacaagatataaaaaccaaatatttaggtacaaaaatatttataattactagtagctccaagttatatttttaaatataattcttaaaattaaatttaaattttttaatttataaaattatatttaagcataatttttaaaagccagaactccaactgatgagagagtaatagaaattgttatttgatctttgttcatatataagatcttgatagtttacactgacattggcatttttaaaaattgtgtgtgcatgtacttggtgggagggtgagctcgcgcgcgtatgtgcgcctgctcactcccacacatttatacacttgatatttcatataggataactgacagaaccttctaccttgtaggtcttgagaattgagcttaagtaatcataatcagccttaccagcaagccttcactttctgagccatcgaatgggcccttttaatttgaattattaatttgaggttgttgctcaatgatagtacttgcctaacatgagaaaaacccttggtttgatctctggttccacagttttttaaatagtttagctttgttttatcaaattgatttaagaccacaaaaaaaaaaaaaggatagcattacatgtaaattagatttacttatcttcttgaatcttgaagagaactaaaggataattatatgacctattctctcataactataaagttggcttgataattgttttttaacatttgaaatggagagaagaatgtaacagccattcatgaatttgataataaattatcatgctataattttttaatgaatttatcttaaaagatgagctctcaagctaggcctttgatcacagcacgcgggacagagacaggcagatctctggaaggaagccaacctgttttacagaacaagttctagaacagccaggccttcagaaaccctgtctcagaggggcaccgaagtaagctatcaaagctaagaaaatggcttagtgggcaagaacactttctttataagcctaaagacccacatttgaacaaattgaattcccagaatccatattttaaaagccaggcatggattcatattcctgtaataaccactttgggaggtagaaacagagcttggtggctagccaaaatagtgaggttcatatccagtgggagactgtctctaggtacaaagtggaagcactaacataaaacatctaatgtcctctggcttctgcatgtaccggtacactcccaaccacacatagatttgcacacatatgccacacactaccagaattaaaaaaccatatgtgaattatcaggttactccactgttttattattatttaacatattctggagtttttagctataagcatacttgcctcttccaaagggaaaggatgtataagtactagtaaagaggggtgactgtcatcatatgcaagtaatacagttagattcctagaacagctgagaaaattggctggaaccaatatgtaaacatttcattataacattaagatggacaaatggagaacatgggaaacgaaggctctcggttatgaggagggaatcaaggcttgaatagctaaaagaaatcatgcatagtcattggtgagggtggtctccccgagttatattaccaaagtactgagattagattgtctaattattatacttcattgataagaatattgtgctagtctttccagaaatattttggatagagttgggaacatttctagccaatttttaaaaagacgaaatatcagtattgctagatgtggtatgtgcctagaatctagtactggagaggctgagaaagaaaaacacaaatttgaggccaacctaggcaacattacaagactctgtctcatcactaggggggagagcattgtagctcaatattaaagtactttcctaaaatatacaaggaccaaaaaaatgtataataatagtctaatggagaaaagattctttttaattcaatgaagaaagataagagttgttcaaaggtagtaggcatttgctactagaaaggtggggtaggaatcaatgctctaaagttaattgtgcatacttcttccttaagagtttaagtataacttagggggccagggggatgactcagtgagtaaaagcgcttgccactcaagcctgagaaattcagattccagaaccgtgtaagtgtgactaatcccagcactgctgtggcaagatgagattgtggagacaagtgaataggccagaggaacacaagacagctaacctggaatatggttttcagtagaggctctgctccaacaaggagtacaccaactctggcctccacactttaggtaatacaaacatggacacattttttttttcttaagtgtaaattagggaaggactataactaagtggtagagtgcatacacagcatgtgtggttgtccctcagttcattcctcaaacaagatagtattggtgctttatacatactgtcccaaaacttcaacagtgagtactgttgcagcctagactacattctgggcctcagtgagagacacaaaacataaacatactgacttatagacaacctaggctcaatcaacccttgagacccccatggtaaaggagaaaatcaactcaccaagttgttctttgacttccaactgcatggcacagcctgcatgtatgcatacacacacacacacacacacacacacacacacacacacacacacacacgcgaaataaaatatttttaaaaactaaagaattaaatgttaacctaaaggttaaaactaaaggccaatgggtggtattttcatagttcagggatagaattgcaagttcgttagttagattcattctgctaattaaagccattaaaacagacgattaaaaaaacatctttagatttaatttttgtatatgagtgttttgactatacatatgtatgtgtaccacatgtttgcgtggtgccaatggagttcagaagagggcattacatttcctgaaattggagttatagatggttctgagctgccatgtgggtgctagcaattgaacctggtttttctgtaagagtagacagtgttcttaatcactgccatctctccagccctgttaaatacattttaaaaacaaactagccaacggtggtagcacaggtcttaatcctagcacttgggaggcaatagccaacctggtctacaaagtgagttctgggacagccaaggctacacagagaaactctcttagaaaagccactttaaaagagagagagactggggctggagagatggctcagtggttaagagcattgactattccagaggtcatgagttcaatttccagtaaccacatgatgcctcacaaccatctgtaatgggatctgatgccctcttctggtgtgtctgaagactgtgatcatgtactcatatatataaaataaatcttttttttataaagagaaactgaaaaggtcaatttttaactcttaaaaccagcatactgatacagtgtaagctagacattgcaaatcattcacacaattaaatacagaggtagtaagcatgtgtaagtgtggatgtacatgcatggagaccagaggaattgatcaggtattttgttcttcatgctgttttgaaacattgtctcactgaacctccattaggctggcagccagcaagctcccaccccagcactggagttacaggctaaagtacagctatagctggcctttcgtgagtattggtgattcaaactcacattctcaagcttgttcaactcccaccttaaagttgagagagagagagagagagagagagagagagagtcctgtagttgtcctaacaaataagtagagaaaagttttttatcatagtagactcaacaattgcaatacaggaaaatacttaataattcaacataggttaaattttggcaatactaatgtcacatacccatttttaaaaggtattcataaatcgggtatgctaacacatgcctgtgacaggaggatgctagtttgaagctagcctggattacatggccacttcaaggacagcttagtttacaatgataggatcctatttcaaaaacatgctaccaccaaagaaagaaacatacaaaaatttattcactaacagaaatttctgggaaatcattttaatttatgtatatataatgggtagcatgggtttaaatgtatgagtttgcataatcttgagcagtattgaggcagggttttaaaaaatgagtgtgtatgttaatatatatttgacaactataccaaaaagaaaacaaatagcaaagactaccaactgacctttaggcaatcgctgggtttttaaatatagcatcttaagtgttcattgaatatcaaatatagatcacattcatttatgtagtaattcctcctagttttcctacagtaatacacaaaatgtatttagcagttacattgttgaaccctcagtacagagttcttaaagattggctttgaagtctttagaaatgcttaaaaattattttacagattagtcttgaattacatgtttatttgtttgttttgtacctaggcacattaaaaaggataaaacatcacatgctataaagaacaagaggaaaagtattctttcaatgtagagaaatgaaaaatcctaagaaacaaaaaaaaatttatttaaacatatcagtgcctcacacctttatattggctactttcctaactccagtaggtttgcacttggagttacatcaccagagaaatcttcctaagcacatccctgatctcgggccacatttgcctggcatgattgtcgttgtttgcaccaagccatggtgctacagtttagcatgcttttattaagaccatttgccgaatgactggagatgaatggccaattggtaaaagtgccagtctaaggtataaaatgccccagatttgatctccagcaccatatgaggcaggtgaccatggactgggtgctaccatgtctagtctttctatatgcatcagaatcttcatctttgatacagggtgatgttaataacagaaatgctggatttatagataccttaattttcatatcaaacacaccacacagtgcctggtaaacatcaccttaacagtgatgttcttttacttgttttattttctaagaaatggaattcatagtgttgttcgggcccaagctagccttcagctcttggacttttgagcagtccttttactttagccaccctagtagctgagactatagttcttggacactgtatctcactttacctactttgaagggtatttatgtgtttatcatcattcctgaggggccacactacacatgcagacttcagaagacaacttttggaagtcagttctctaccttcatgtgggctccaggtttggataacaagcaccttgtcaaataatctcgaaagcctctttgtaactattggagccacttatttacttagttatttttatgcagggtctcactatgaatcccaggctggcctagaatttgctgtgtagactaggctggcctagaatttgagataatcctgtctctgcctcagaagtggtagggttatagtcaagcttaaccaataagaaacttaacattaaacattattttgcatgttttctctaagctctttgaaaatagaatgtgcagtagcccttacatacataccattgccatatagtgcatactaagtaaatgaatgatctttaactgtttactcacttttacttaagtatatttttcctctgaggtgtgttttgttcctgaagatcctcttaaaaacaagaaatgatagtacataaaatatggtcagtaaaatacttaataataacctgctttttaaaatggacctaagaatgcagttagcctaatcaggagtcttgttttgggttttgttttgttttgtttttttttttaatagaaaccattttcttttctagaccctagtgtttgttcagtatttggacattaggagctatatgaggatacaagatcaagtgtgtctcctcttacttatgagtgtttgctagaagagctgcagcctagcaagtgataatgtagaagtaaagagtgggtttaacagcacaagtttaagattctctaaatctcagtggaaggaaacctatatttcactccagaagaaaaagtagtgaatgcccttggcattgaccattaaaattgtctatattcatattgagtttctctgggacatgaaatgcttcataagttgtattcatggaagtgattagacgtttgtttaggcagccaggcagtagtggcaaatgcctttgatcctaggcaaaggcaggtggatctctgtgagttagaggccagtctgatctaaaagcaagttatgcgagagccagggttacacagcaaaaccctgtctgaaaacccccgcgtctcccaaaaaagtatgtttacacttttggcctaattagcagagggtatttaatgggatgagatataggatctgttgcaaattagaggttagtgcctttgctacctagccttcaggaagatatgattcagctctcatcaaagctttgtgtttcacagacttactgagcccattaaagaaatggaagtctcgctatctgatggagcagaatatcaccaagttgcttcagcctctgtctccagttacaccacccccacccagctcaggctcaaagagtccccagctgaccacacctggccagactcacccaggagaagaggagtgtcgaaatggatacagcctcatgttctcaccaatcacatctcttactactgctagtcgttccaacactcctctgcagtttgaggtgattggggttttgttgttgggactgatatgaaaatcactgtttatacctctttatttcaaatataatataatttcaggtgtttttaactgtcttcgttcatctctatgagaaccattagcctggggtaactgggctgtggctgtagcctcttgtcttggcagcccctgttctgccagagtagtaatagtgttgccgtgatcccttcagctttcttttcacagtcagtccttcaatcatatttgagtgagcatacaagatcattatctttattatctgtgttggtcaacagaggtgcttgggtgcctgatacccgttagtttcacaagcctgggagctcagactacacagtgagctcacatctgtgtatcaagacctgcctataactataaagtggctttcccaggttctttggtggctcgcctgtggccagggaaacagggacttaggaacattgggtttctaaggatggtggcggtgctgttgctgtttgtttgcttttctacttcagctgattttattcccctccctgttacagtgtattaggactgagtagactggaggctagtaacacacattaattgttggattacattagaaatacatgtataaactgtttctaaaactgttatattcaatcactttgatattgaagttcaagtggcaagtatgaatatataatccatgtgtttttaaaaactcatttgcatgtttctttatttaaatggatatttgtggggggggggaagaggacttgatctacccactaaacctctggctttcacttttctggatgttgtgttgatgaagttgaatatctagcagatcacacttctctgaagacttttatgactgtaaggattaacaatgcctgggttctaaaggcactagcaactgaaagtacatgagtgtgctgctctgcttctaactcagtccagtagtgacttactgtagagcaaaccttggtatggaaaaaacatcatcctggttacattttttttctaggtaaattatcatatttctgtgtcctttttaattggttattaaagaagaattcagatttaatagttaagcttttgttagcaattagaatttcatggtaaggtatccaaagaaaagttgtccctgtagtgcaatcagttatggagatagagttgcaccttttcgtggcaagtttcattattaatttgaaattacagaaattagaagtcttccaaaataattttatatgtttcctaccactgctgcattttaataactataaaacagcatgcaaatgaaaggtattttaagatagagaacatagattttagtgaatctcagtctaagaataatgtttaaacaccaggaagcaggctagctcagcagtaaaggcacttctgcaagcctggcttcctgaggtcagtccctgcaacccatgtggtaggaagccaacttcacaagtgacttccccacatagacataaaataaatgtgatttttaaacattgaaacaagggactaaagatagcttagcagtcgagagcttgcactactcttgaagaggaccagagttccatagccagcacccaagttgggagagtcacaacgatttataactctacttcttaagaggtgaaactccctattgtctcttcctcaggcacctgcacacatgtgcaaagacacattcatgcatcattttttaagtaagttgaagtattttagggactagaaaatggctcagccattaagagcacttggtgctcttgccaagaactgggctttgattcttagcacccacatggtggctcataaccctctaactccagttccagggatccgatgccctcttctagcttccataggtaccagacacattgtgcacagacacttatatgcaggtataaaataaataaataaatatatatacacacacacacatacatacatatatatacataaaaatgcaaaaataaaataatttttaaaagattatcaggaaggaaagaaagtagcgaaaattttaaatacatgattataaagtactaatttaataatgcaacgtcaccattctcataaaaacagctttgccatcctaccagtcataccatcattctgatagcaaggctctttcctgtttttgagtacagaagggttggtttgcaacctttttttcatcagaaactatagcagggggttgggtgctttgggtatacatctattatttgaagacaccaaaagtttgagcccactctgagctacattagcaagaccctgtcttttaaaaggaaagaatatattgaaagatgatataatacaaattttatttccatattgttttttaaacataaaattattatttgaaagaagaaaatgttgaaataaacttgtctgttaaacgttaaaaagagctgggcgtggtggcgcacacctttaattccagcactcgggaggcagagacaggtggatttctgagttcaaggccagccagggctacacagagaaaccctgtctcaaaaaaccaaaacaaaaccaaaaaaagctaaaaaaaaaatattaaaatgcaggctagagtgatgactgccattaagagcactggccattctttcagagaacccaatttttaattcccataacacccatatggttcctcacagctatctgttactctagtctctagggatttaatgccctcttctgacatttcctggcattgtgtgcatgttttacacaggcacacaggaaggcaaaccacttgtacacctaaagtaaaaatagtatttttaaaaatttgtgaaaaataaagtagcagtgaaatatcaataagtgtcaggagtaaaaccagctccaagtggaaaggaaaaaccttgaataagaagcgtgttcatatctagaactgaggggatgaggtacacagtcacagagaaggaggggaaagaatctagaagaaggaaaacaagagccctgtgctttgtacacccagcaccctccccattctaaaacattgctatccaccttgttttgctgaagcagctccatttatatatcctagcatagcatagcccacgtctgttttctgggcctcagttgttgatagtctgtatattgagaactttcccttttccccagtgcctggtacagagtccttgtcatagctgctatcatcactttcatgttacccttcacaccatcacctcaagagctcactctccagttcccatgtgttagagaggtattacctcagcaaaatgttctgtcctatgaaagtcacagaaaaaatacacatatacatggtattggggtgggagggtgctttgtttgttttgtgatccagtaagtacaatggatttttaactctgttagatgtgtgcaggtgtataacagtcacttgagaggaactgatcatagttcacaggtatacccctaaagctagtaagagaataaagaaaagaaagattataatcagaggaagtatggggtgaagaaacagagttcctctaggaagaataaggagtaggttgtgccccaccataagaaacactgtgagccctctaaaatgattcacctaattctttcctgagttctaattgaggtgttcattgatagcatgaaacattataagtcctttctaaggtaccaggaagcatttagctgaactaaccactttgtggaagtgagttctgcagttaaacatttaccatatgcataaacattaaccatcctcaccaccaaatccctccctaaaaagtgtggcaaacagccatgcttatcgttactttctgttttgcttcttgactctgagaagataaataacaagatactttttcctcctctagaacatctcctcccctgagggttcccctgcacataggcctaagcccctgtcaccagaggtagttaccataccatctcaatcacatgcaggctgagagtgagtgcacaagggtggtcctgaattggggggtgagggggctggactggagggtggcctctcattcacagcaaatagagtggatcttatataaaaactgactgcacaggaccgtggggaaatgagtagctgtttttatgttgtggggttgcttttgttgtcatttgggagaaggaatggctgaagagtttcattaaagagaatcttcagaggatgtagattctatgtgcatgagagcattgttagagaaagtcatgaataacatcctcctgttaacaaggaaactggagttggtcgacactgtctcagtatcatgtcagcaatgtataattggggttaaactgacagctcacacggctgggtgtctgggctttgggtgacagatgagcagcttcctttagggaatccagcgttctctggctttccttcatttcctctggagtgcctagttgggtgtaagtatgtaaggaagcttaagcccaagctctgggttacaaaccttctcttgtgcagaggctgggatacagtttgtgtgcagtgatttatacctcttaggataccaatttcagtactttgctaagaaaccctcctaccctaaagatccaaaatcatgatttcagtgttagcagttataataagctttagacatgtaattaattattaaccctataaatctacatggagctttttttctctgtaccttttcaaaattaactggcctttagtctcactttccaaaataattagggccctactccctgactaatcaccaaattctcagtcagtaggatattctgtagatcatcatgaaactgaaaagattatattccactagtttattgttaacttcctgagtattgtgagtccatcttgttgggaaagtatagattgctctgtcttgggttgctaaagattcaatattagaaaggctttgataactgatctgtctagttaagggaatgttggtgttaagcgatacagataagcagtaatgggtcggttttatcactggtgcatttcagcctttgatatgctttttggcggtaggctttagcagttctttgatagattgatagacagcagaggacacggaattgaacagacagaatgttgcatgagaaacataatccaaggtacaagtaaataaggaatggattcgttgcaacctttaatgctattctcctagtgagtaatttaccatgcttggcttttcaactacctcctgcttttctccaccttcccttacaccttccattgaaactaatttaataatatataacatcagaagccagcaacttaagacctttctgtggtgtgtgtgcttggggctcagatacatccctggctacactgccagccccacatatgctgtcaaacgatgtgatgaaggctgagcagagtagtcatgtttgcagaattgcctgatgccttcattccctttttgccctttgactttttctgttataccatgtcccatatctctgttgatttttatttcagctttgtcaccgaaaagacctagatttgacaaaagtgggattcccagactccagcactcacagctgcgctgataggccctccctgcttaactgcaatcatcctgacctggcttctcatccctctgttgttcccacctccgaggctggcttcccaagcaggagtggagatggtcctcagaccttgctgagaaactcagaccaggcgtttaggacagagttcaatttgatgtacgcctactcccctttgaatgctatgcctcgagcagatggactgtatagagggtctcccttggtgggagacaggaagcctttacatttagatggaggatattgttcccctgctgaaggcttttccagcagatatgaacatggctttatgaaagacctctctcggggatccatgtcacctggtggtgaaaggacctgtgaaggagtcccatctgctcctcagaacccaccgcaaaggaaaaaggtaagtattcatgttactcttttaaagaatattagtcagataattcagaactttctaagctccagtgcataacacttgtcctactctttgctatgacctgtaaaaattagttcttttatttgattacattacttctttggcttatgtgggggggggggggcatgaacatgccaaaagcacatacatagaaatcagattacttgtgggaatcagttctttgcttccaccatgtgggtcctgggattgaactcaagttatcggtcttggcagccacagccttcatcaattgagtagactctattagtataactggaaagtgttgtgaatagccggcaggactgaagtgcagtcagtaaaagagtgtagccatgagtaaggctttccatctttagcatcccaaatacaaataaagcaaatatctagcttgccttagaggcacatgtctgtgaacctagcattctggaggttgaagtgggattagaaagctaaagctatcccaggttttttaaacacagcaaattttacataactgttgtatgcaactgaaaggctagcacactggaagaataccaaaagctgtgttactcagagaacccagtttggggcatagctttaagaccatcagatgtgttttcccaggcagatgtagttgttcatgtttgtaatcccagcacccattcatgatgttgaggcagaaggattgagaagttctatgccagaggccaaagagctgggtcatcagttaagagcatatactattcttccaaaacactcaagttgacttcccagtgcctgaagtgtttaccaatgcttagaactccagctccaggagatctgatgacctctttgaccttcatgagtacttgccaacccaagccacatagaggcccatgttttgtttcagtaattcattttgtaatcacagcggttatataattagggaatgtccttatcttgcacatgagaaaactgaagctagttaaataacttgttaaacaacaacagataaacaaaggagtaaaggcactgtcctgattctgattccagattacacaatctagttgttaatattatatgatagatttgattgcctcctagagtctgcactaatagagcctccctagaaaattgcactaggagattctgaattacagtggttgtagttgctccaaaggagttgttcacatcttagcagaggataagttaaggaatgaacaagaagtcttttatttcgcttatttgaggggtagaaatggaaaggcggtaggtttagccacatttcaaatgatgtgtaggaatcagcctgcgcatcaagagggaggtgttcctgcgcagtcagtctgtgatactacactggggtacagatgggttctgatagctggctgcagttacaatgccagggagcaccaggaagcaggtgcagagagcagtgggtagatcagaccttagagatcttgccatggcctggggcttataaaactcaaaaaacctaacagctgcttttccccccttaaatattgttttgggattatttttgggttgtcatggtgacttggatgaatttattgttagggattcacaaagctgagtatactatgtatgacagtcttacagagaaactagttatatcctcatagaaataaaggctcgtgactttatttcaattataataatgttcattatccaagtttattaacttctccaatattatatgtaaaaaggcacacacaaaattatttttactgttatttttgtggtatttcacacttaggcagaaaattaagagcaccttggataggaaaaggaaacactagcacacaataggatgacaatggagctcttccttacatgagcagtactgactttgaaattgtataacatgacatatctttgcatctctagttttatttgttacatatacaagtaattgaagttagaatttgtttcagaaatatttctaaaatatttgggcacttgtgatttttgtactaaatgttaacagtaaaaaaagctaaggactggatgactggagagatggctctgcatgaaaaagcacttacagctctgtcagaggacctaacacctatatgcagcagtcacaaacaccaataactccagctctaaggcagcccacatccccttcttccctctgaaagcacatacatatgggtaaataaaatattttttagggctaaacacattgccaagcctggcaaatctgagtttgatcctaaagacacacggtaagaggaaaacaccacttccccaggttctcctttgacctacatacaatagttaataagtggggttttgttttgttttttaattaaattttgattaaagctaactttaattttattaaagctaaagcatatatgtgataccatatacctgtgatatcaggacctgggtgactgaggtaggaagatcctaagtccaatgcctgcctgagctacaaagatcctgtctcacaaaaatgaatgagtgaatgatataatttacagattaaccaaaaaaaaaccaagattctacagtagatttaataggcaatagaatacagtagtggatggataggaaaaggtttgtttctgatagcaggatgatatatgagtaaataattagaaggtagtttgaggattgggaaaaagtttctaggttgtagacaggttgctgaagtatataaacaaaataatttcttcttactttagttctttaatacctttcttcccttatatgtaatacagatagtcttaaatcccatagtatgtcttcaaattttgaatattatgaagagccctgaaatactggctttttcctcttggtgtgatagcttatttattgtggattatttttgtttgttgttaatggagtaagtgttcctaaggaatgaagaacttttttccaggatacaaaagcattctgttttttctgccatactttttatagatgcccccattttggtatataactgattgtaggttaccaaggtgatagtaatctcacaagtttctctgaagaaagtaaaaggatatagtcttatttgagcaccattgtttgatagaatattttttgtcctcaccagtttctgagtggcttgagtctgtagcactgctcagatctcttttatacctaaaaaaaagattgttatatagggactggaaaggtccctcagtgattcagagctcagttcccaacacgcacagcagatggctacaactgcctgttgctctcctctccagtagtgttccaactcctgcactcagcctgtgcacacacacagctgtaaatacagtaaaggctattacagttgatacctaagccactcactaatgatacattttctttttcatatctaggtatccttgctagagtaccgcaaaagaaaacaagaagctaaggagaattctggtgggggaaatgactcttcacagagcaaaagcaagtcttcaggagctgggcaaggcagcagtaactctgtttctgacactggtgcccatggtgtgcagggatcctcagccggaaccccgtcatcccctcacaaaaaattttccccgtctcattcctctgcatcgcatttggaggcggtaagcccgtcagattccaggggcacttcttcctctcactgcagacctcaagaaaacatcagcagtaggtggtaagtttatgtttaattagctttataattaaattcaggtgggaagttacacattcatttccagttttacctgaagtttttggagcacttatctaagacaggcaggtaatttgccatctgtttgttcagctagttagtgtaagccaaatcttctcccttcagagactcactgaacagtgaggttttgggtgtccacgcgctattttttttttttttttttttgatgagaggtaagtaaacagtccagccaaatcgctcccctcccccaccccttgtgtgcacgttcatatatgcactcttggtcactcatacatgcatatggaggtcagagaacacttaaaggaaatagttcttccctatttaaaggaaatagttcttctggagattgaactcagatcttcagacttaacctttacctactgagccatcttgctgactctggttttctcaaattgaaaaagagctgtgtcccatgctgctagcatatacagagaaatgcaagacggtctgaaaagagttgtctagtttagaggctggagaaacgactctggttaagcgactaactgatcttccagaggagccaggttcaattcccagcacccacatggcagctcacaactgtctgtaactccaatctttgacacccttatacagacatacatgcaggcaaaacactagtgcacataaaataaaataaaataaaataaaataaaataattaccatctcacagttttgtgctggagagatagttcagtggttaagagcactgactgctcttccagatttcctgaattcaatttccagcaaccacatggtgcctcaccaccatctgtaatgggatctgatgccctcttctggtgtgtctgaagacagttacagtgtactcacatacataaaatacatacatacatgcatgcatgcatgcgtagacttgtcaaggttagaaggtatcataaaaaataagtaatattaatgacaagttctcagtattgaatgagatagtttcttttgtttttttcttttgcaattttttgacataggtctcatagccttgaactctttgatccacctgtctcttctttctgggtcctagggttataaatatgcatcacagctaggagtacagcattcattcttttcttttttcagaggtggggtgtctacatttggagactcgagaccaccttactttatgataaaggatcgctcactgaacctggagctcactgattaatcccgagtctctggccagtaagctccagggatcctcaagcatgggatcttgaaatgagcctgggaaagaagatacaggtctcaaagtattatattctttaatctctaagaatcctataaaaaactatttcaaagctgggcatggtggtgccttaattccagcactcgggaggcagaggcaggtggatttctgagttcaaggccagcctggtctacagagttgagttccaggacagccagagctacacagagaaaccctgtcttggaaattcaaaaaaaaaaaaaaaaaaaaaagaaagaaagaaaactatttcaagaacacagtttcagaggaggaaatttcacattcagacagagtttaaaagaagttaatatctttaatctacttttcccagattgctttctcactgcccctacttttatacattgcatagtttgaagcagaggaaatgccttgttctcagtaggtcctggagaaaatagtgtaaggatggtttaagagtctgtactacaccatctttatcatggtgatttgtttcagactcttagcccttaatctctgtggcttctgtacctttgcaggatggttcctacatcagttgaacgactccgagaaggaggtagcatccctaaggttcttcgaagcagtgtgagagttgcccagaagggagagccttctccaacatgggagagtaacatcacagagaaagagtcaggtgagctaaggtctgcagttcacagcaaatgttgggataaagtaagttagtttctgacctactcaggttctgctttatgctagcttccagctcagtcttactctttgggctacagtatacgtgagatctagcgttgcttgctctctgtctgctcttttcccaagggatacttttctgtaactctcatctccaatgttccggagctccaccttcatgaaggatgaagagaaagaaggagacgagaataagatgaggcatttaaaatttagcgcataattaaccacttactatgcccttctggcatgctgcgctcattttttcacagagatcagcatgtattgatgatttgactgaatgatacctatttcctatgtgttctaagaagccaagttgattcttgtaatgccttccagaccctgcagatggagaaggcccagagccattgagctcagcactctctaaaggagcaactgtttacagcccttccagatatagctaccaggtaagtcaagagacttctgggctctagagaaagaagtgcctgtggagttcagatcctgtgttcctagtcgtgacacactgtcagctgctaaagtctgcatagtatagccctgtaagtcaggcatctgctcatctgctcacctcagggatctttttttttttttttttaatttattattatatgtaagtacacagtagctgtcttcagacaccccagaagagagcatcagatctcattacagatggttgtgagccaccatgtggttgctgggatttgaactcaggaccgtcagaagagcagtcagtgctcttaactgctgagctgtctctccagccccacctcagggatcttagtaaagcaaatgcatgcatcagaaactgatgtttgactgcttttgttagccattaaaatgttctgggggaaggaggagcaggctaatgatggctcagtgagtgaaggctatcaagcctgatgacctgagtttaatccccagaacccacacagtagaagaaaagaatggactcttactggttatgctgtgtactccacattactgttatagcacacacacaacctttttagtgtgcagaataaaagaatgttataagcaggtcaagttattgaagggactaagttaaacttccttatgcttttctcccaactcttttaagctcctgcagtgtgacagtccacggacagaatcacaaagcctccttcagcagagttcgtccccctttagaggacatcccacccaatctccaggatacagttatcgaactactgcactgagacctggaaaccctccctctcacggttcttcagaatcctccctctcttccacgtcctaccccagccctgcccaccctgtgtctacagactcgttggccccatttacggggactccagggtattacagcagccagccgcattctggaaacagcactggcagcaatcttccaaggaggagctgttcttcaagtgctgctagccctaccccacagggcccctcagactcaccgacctcagactcggtttctcagtccagcacaggaactctgagttccacctcctttcctcagaactctaggtcttcattgccatcagacttacggactatcagtctgcccaatgctgggcagtcagctgcctaccaggcctccagggtatctgcggtttccaattcacagcactacccacatcgtggtagtgggggtgtacaccagtaccgactccagccactgcaagggtcaggagtcaagactcagacaggactttcctagggcttctggatatgggcaaactgaacttaatgagcccatagctgcttccttccagctgcctctggaatcaaggccgagcatatcgctggggaagaggggtacaaggtgccagaggaatgggtctggtcagcaagaaatgagacttgtggtcatgactggcctccggccttggagaaagatgtaaatcttgtctgaagcagagactataaagaagtttctccctgctgttaagggtacattgttaacaagcaaatggtgtttcggttagtaacggttctaagtgcaatgacttgtgttgaagcctatgtctcccatccttgcctgtagcctgtagtcacttgtgcagtgaggacatctttttcaataatttttttttttttcttttcaaaagaaaaaagtgggaaagagccaatcttaaagccccaagccatctgagtagtgttagggttttatgcacttaagggaaaaaaaggtaggtatgtaaatgtctgctgtgagacaaccattcctaatgcagatgcatggtcaaggtgtgtccacctggagtgctccctgcctttgtcttaaagccaccaggaaatgggcagggagaggaatgtgggtgcctactctgactgaggcttgcccggctctctgagaggaggagctcctgggtatttgggagcagatttgggatggactgggctccagctgttaccatccactcctccttccaagttgtttcacagtttaatgatagccctgtgaagtagagaagtgaggcaggccagtttaggaaacatccagtggtctgggtaatctttgaattttaattttcctattcccagttaatcaggagttgctgtcctaagagcaggacggcctccgtgactgaaaagcatgcactcatgactgcagggtaagaatgggacagatagggttgcggagtggcaccgacagggctgtgattgtgtgtggggcatacctgccccacgtttctatggggaatgcttatatgacagtgagcaggtgagagttagcaagtcacccatacccctaacactgttctgtaggagagacaaagagcagactggcttctccccatcagtgcattgtgcctgttgtacacccctggaggagccctgaagccagcccaggtggggtacacaatctttttaaattccatatggttgccagcttatttctttcacttgtttactgtaatacctggcgtgtttttatttatctaattttgtattcagctataaccatggtagggtagtgagtgtatgacagtgtgatccctggtgctgcagtggaccgtacttcttttggacaagatatactgtgagtctccctccttacctctaattgttttctttcccattccctagactctttcatctccttttctaccctgacctacaactatcatatgcacagtcttctctctttgtgtgtgactgttacaaattttcacttttcaaaattgaaatcaggtgtttgctcaaatgaggggagaattttttttttgttttggttttatttgtttttaatgctgaaccctcggcatagtactttctgttgttttccccacaaacccatcagtctgggagagcattgggagtggaaatcatgttgcctgggatgctggtttctttgtatattatataaaacgtatgtaaatgtctctccatttgggctggggtttgcattctcccattggctaaaagccaaggggagaggccagcgggcaggcggccctcaccctgcctggcacgtgcagagaccccagccactctgtgtgggcagggtgctgtcaagaccagacctctgggggggagggtggggggaggggggactcttggaagggaaggagcaccacttcttcctcaagtggagtgtttacaccttgctgtaacatttgaactttcacaagagatgtaataattttgataataaaattcttaaccataatcatcataatgttaacaatgtgtttgttcgcttctggaacatcacgttccctgatttaacctttcctcacgaaaggcaaggtggacccgtgtcctgggttgctcttagtggagttctgcctagaatggggtcaaaaccctgactcctcttcctctgaccatctatgcgtgataccaggccagtgttaatacaaacctgcagtattaggacatacctctggaagctgactggtcatctgccctgcagctatgaaacattgatgtttttcatttaaaggcaaagccagccattatctgtggtaaaagggtattatgctgattaaaacagaaatgggtctgaacaaagcaatgtctcttctctcctagaacttctgtataggggagaggtaaacactggtgtgtagttttaatattcacttccagtttattgtgcttgttttcaccatggtgataccaaaagcataaagtagaaacactttccaaaccccaacagcatttggagaccacctccatattactagaggataccccagtctagataaaccaactgtcaccacttgtcctctcagcagcccaaatagccttggaagagcaccccaggaaaaataagcaatcatagtcccctgacactgagcctgcatgaaaaagaggcagcacttgtcttcaatggtaagtgtcaagggcaatagtgtcaggtgaaactggctgtgaagcaagcagctctgtgaccttgatcggtaccccgattaagccagatagaagaaagcagaacggccaactggctactgactctggtgctattaggtggtacaggcaaagttgggatcatccaaagcccctgcgtgccgcaggtatcctgggatagctatgagtatggcccaacacacttgttaaccacatcatgttgcggtaccaaagactaggtgattgaaggtatctaccgtatccccattagaaacacctcaggcggtgttactgtttcctggacaggtcactgtggttaaaagggccacacttgtttgtcagaaaaagtctccaaggagttgccactgaaactgagaccttagtgactggggagcgttactggtgatgccagttacttcagaaagtgtgagctccgttagaagcttgattgagatggagctgcaaaggggctaactgaaagtccggtggtggactcgaccagacgggctaagttctgtctgttaccttacagacagtatgtgatcaactccagtaaaacagcacttctagaaacaggtagcagattagatttgctttgtaggttgtagcttattgtccctaaatgaggaatccatattctcagcagtcgggaaaatctgttaagattttaagcaaaaaagtggcatgagctactgtgtggtttactggttcttgttttcttacacttaacgctctttaagattgtcttgatcctgttaaaggaaaaattaatagaaactgagaaaaccgtttccagacattaacaattgttgaggcaaacaatgcactggcctctgtggtggctattcttggttgtcagcttggctacatctggcattatctaaaatgcaaaaatggcgggcacgcttgtgagagacttttattttgaaggaggaatgtctacttcaaatctggatctctgagataggcaggcacaccctgcactcatcttttgagctgggaaaaggcatgcctttctttaatctggaactcaggcaggaagactctcctcttaatctctaacgtgggcaacacctgctggaagcccacggaaggatacggaaggagggagctttgttctttgcctccttgcccttacctttctggcaaatcctagagcctcctccttcaagagtccaatgtacgctgaagacctgctgagacatccagccttgtgaagtgtgcaacttctggattcttggacttcctgttgggttagctggaccttatccgtaagtcgttttaataaatcccctttctatatagaagaggttcattctgtagattctgttactctagagaaccctgaccttctgttaaaatggcagtgctagagataaaaagtacctgatatcaggtatattttgcagttacacgccaggaaattgacagtggatttgaatggcagaagtttactcaatacctccaaccagctgtgttttggtgagtgtgtatgtaaggtattcaaacatggtaactgtattgtttctaaagtaattggaagctaaagatttcttgggtattttggagtggatgttttaggaatacctaaaatacctgtcaccatccaccacttaattctgcctcgaataagaagaaaataagtggtcacatggttctctttaaaacaagcatattccaaccaccacacctgtccaggatgctgtttggtggggatggctctgcatcaggtaggaatatgaagactattgtccatcatctatgccatgaatttaaaactgctttaaataaagcttgtttaagtgacaaatagtaaagatagctagcacagacaccattcacatgagagtttcaacagaagcaccaaggagtctggagaaaaaacaaaagctacaactgagaaaagctatcctaagataatcgaagctacaaattagggggaaaatatatatgtaattaatttttgtcaacatgcctgggaagagggaaacttagctggggagttacctccatcagactgacctgtgggtattgtctatggggcattttcttgatcgccgatagtggtggtttgaataggtatggcctccatacctatgactcagctgtttgaaggcttggcccgtagggagtgtcactattatgaggtatggccttgttggagtaggtgtagccttgttggaagacgtgtgtgactgtaggggtggactttgttagtctcctatgctcaagctacatccagtgtagcacacaatcttctgatgcctttggatcaggatatagaactctcaactctttctctagtaccatgtctgcctgcatgtagtcctgtttcatgattaataatggactaaacctctgaaactatacaccagccccaattaaaatacttcttttataagagttgctatatcatggtgtctcttcacagcaataaaacccaaaacaagacagactttgctaccaggagtgatagacctgaccatgcttgtgttcggaggaatgtagacctcgggaatgtagattagaaaagcagttgaatgctttaagtgaggcctagacagtggtgctgagcgtgatttgaactgtgtggcctggctcaaatttcagaggacaagaattttagtatgttagctagagatcattcttgtgatattttgtaactgctttttgtctgtgttcaaaaaatctgcctgaagctaaattaaagggttagagatcagttgcatttgaagaggagatttcaaaacagcctgtggttataaatgatcatgcttataaagactatagtgaaaatgggcatccgaagaatgtggctaaatcctgtgttcaaggaaataagttgattaaagaaaaactggatgttgaatacagggaatggtgatcagggcaagctccacccagctaaacttctgatttgtgtaaaaggattaaagaaaagcttaggtccaggcgtggtactccacacttttaatcccatctctcaggagacagaaacgtgcagatctcttgagttcaaggtcagcctggtctgcagagaaagtcccaaaatacccaagtttgggcagtgaaggaaaccagaaagctggtgaagatgtaattgaacaagggggccattttccagccccagccagcagcaaaactaaagaaagttactgaggccgttgtgtggcaggggtgtccctgcatggaagcctagagaggcattgcataaagccctgaaagtgaagcctagattgcctcagagaccctaagatgttagaaatgccagagccgtggtgtacctgcagaggacaactctggagtggaaccagcccaagataaagaagtatgttgcagccaacaaagctgaaaggagttggagagccaaagaatattttgacatcagacatgtggatggagagtttggagttgtccagctagttttcagttttgctctggcccagcatttccttactctgctccatttcagaatggtaatatatatcctatgccattaaatgttttgaagtatgtggtctggtttttttgttgttgttttgttttgtttaataggcagttatggttagtagattgcatgaatcttagaacagactttgaaatctggacttataaaattgttgagactatgggactttggaagttggacgaactacatttttcattgtgttatggctgcaagcctatgtggggcaggaaatggaacgtggtggtttgaacaggtatggcccccatagattcatgtgcttgaatgcttggcccataggaagtggcacgattaggaagtaggaccttgttagagtaggtatggcattgttggagggagtctgtcattgtgggggtacgctttgaggtctcctatgctcaaactacacccaataatgtcagtcaccttctgctgccttcagatcaaaatgtagaactctctatacctctaacatgtctaccttcatgatgccatgtttccctccatagtaataaagaactaaacctctggaactataagccagcctcaatgaaaatgttttccttttataagaattgccttggtgtctcttcacagcaataaaacacaaactaagacactgattgggccttatcatacctaggtcccctggacctaagctatgtcagaaacgagctaagtaaaccagtcagcagcattcctccgtggtctctgcttcagtttctgcctccaggttcctgcttcctcctgccctggtgtctccagatgatgaattgtaaagtgtaagctgaaataaaccctttcccctgagttgctttggtcgtggtgttttatcacagctacagaaagcaaactagaacacatacttagtagatttaatcccagataaccaaaatcaagacatcctgaggcagacagtgccttacagcagccagcacttgcaaggctgagtgaggcaaaatgatcactgaatttgagatcagcctagactgtagacagaggttctca

SEQ ID NO: 2 - DNA, 268676 bp, Mus musculus
gtcctgtaactcacagaaatcctcctgtctctgcctccagaatgctgggaataaaaatgtgtgctgccgggggctggacaggtggctcaacagttaagagcacagactgcccttccagaggtcctgagttcaattcccagcaaccacatggtggcttacaaccatctgtaatggggtctgacgccctcttctggtgtgtctgaagagagcaatgttgtactcatatacataaaataaaataaaataattttttaaaaatgtgtgctgccaaggctggtgagatggctcagtgggtaagagcacccgactgctcttctgaaggtccagagttcaaatcccagcaaccacatggtggctcacaaccatccctaacaagatctgactccctcttctggtgtgtctgaagacagctacagtgtacttacatataataaataaataaatctttaaaaaaaaaaaatgtgtgctgcaactggccacaggctgtcctttgatgatctttgactaaagaactgactcattaggactcacctcgctctcacctttggaaagagcttcagttgagcaccgaggcttcctcaggcgtcccctgctgccagttcatgcttgagcgggatccttcctgatggtctcaaccttgttttttcctgtgaggtggattctggttttgttggctcagtgcaaatttacattctttttgaagtagcagcttgtggttttctttggggtgtggccaaggaatcctaggctatttggtttggggaccttttgtttatttttgtggtatgcggcatcagatctgggtccttacactgtgcacgcgatgacttagtgctgtactgctgagctctaccccaggctggacagtttttgtcttagaaacagttccttccaggagactgggtagagccgcagtggctgagagcacttgttattcttgcagaggatttggctttggttcccagcaccctcagaatagctcacgactacctgaaattccagctctaggagatctggcacaagttttcacacataatggaacatatacatattctcaggtacatacacttatacacataaaataaataactattttaaaaatcagatgctagggatggaagaggaaactgtagctgaaggatgagctgaatgtatgagggttttgccagcgagtatttaaatgggccacatgtgtaccttgtgcagaagagggagggcttcagatgtcctggggttagagttacagatgtttgtgaaccatagatgtttgctgagaatagaacccaggttctctgcaacaatagcaagagctcttaactgccgaaccatcttcccagcccagttggttaattctttttctttgactgtgttctgcattaagggcctaaagaaagcctttctgagaagggtcatgcctgcctccctgcttctcacacataagccctccggtggcgccttgggaagtagactctgcacagcaaaagtgtgggcattccccagggaccccaccttctcccacagcagctatagctttccactagtaaagacagggctgcagttttagcaatacagttctgtttgaaagaagctagagggacactttgttcagggaacatttcctaaacaagctgtgctctctagaattgctgagttcccttttgaagtgtgtacaccacaccagccgcccgctgtgtctgcagtggttcacctcagccctcgggtgcgggtgacctgtaagagccgggccttacctgtggcttctgaagagctctgcaatcatattagcatgcttaacctctaatgttggtagagaggcatgtatcaagtggatggtaatgggtatgagtgttttgcttgcatgcatgtttgtctcctggaagggttgcaggggtgctaacatcctctggtgccttttactctctgtagaaaaggcatttcgtggatcaccggagagtgctggtccgtggaggaagcgggggctctggcatgagctgcttccacagtgagccccgcaaggagtttggaggccctgatggtggagatggaggaaatggtggacacatcatcctgagaggcacgtcccctggggcagctggggagggacagcctgcacacggggtggaggtcctgctgtcctatcttggcacgtatctgcactcaaacttggtgtgtacacagcatttttatgaattgtgtctgtgctcagcaccagtgtaccaaggcaagagactttggatgtcatttttgttttttaatctcagaaacacaagttgtttcccatcaggagcctcatgacagcccatgtcacagggtcagacagtgcagcagagcccttggctgtactgagcaaatgcctggcatgaatattcagcaagctgggtgcaagcatcttcatagcataatgaagttagctgctggttattgtatgtgtacgggtgctaggcctgagtgcttgtctgtgtatgtaccacatgtatgccctgcagaggccatctgacctagaattgcagacagctgtgagctgccattagacgctgggcaccaacctgcatcctctgcgtgagccgccatgctcctaacagtgcccagctctttagctccgtaggtgaatttttttgtgtttttaattgatgatagtcatattcaccttatatggtgatgccttcctgctgcaagtttgaaaaaatttcaggccagtcagggctacaattctacacagtgaaaacttgtcaaaaaagaaagaaagaaagaaagaaagaaagaaaggagggagggagggagggagggagggagggagggagggagggagggagggaaggaaggaaggaaggaaggaaagaaagaaaggaaagaaagcaagcaaacaaaccagccagccagcctatggtggtagtggtgatggtagtggcacatgcctttaatcccagctctcaggagaggcaggcagaggcaagtggatctctgtgagttcgaggacagccagggctaaacagagaaactctgtctcggggaagaaaaaaaaggtcatattctatttcggttaggataatgaagagtgtgggcggccagccgtacacccaagccaggggaggaggagggtggcagatgtaaggccctgttccccgctcagcagctgcgtcggctgtcttaacacaaaggaacatgaggttttgctcttgctctagttgaccagcaagtcaagtccttgtcctcagtcttatcccagtatcagggcttcagtggagaagacggtggcagtaaaaactgctctggacgaggtggtgccaccctctacattcaggtaagctggggagctggagcaggagtcgtcccctgcgtcctagtcactgagtccatgggtgactaaagcacccagctgggaacagaagcggacagtggtgtgttttaggggtcacattccccacacaatcacctttgcactggtgtggtactgtgttgcttctgacccaagagagtctaaaggaatgaccttgaagagggagccaagcacatactttcccatgtctagacaggggcagcatgcccactccagggttccacactcccatgccggttccctactgcttggttgttcaggtcctatagaaacacttcagaaaagccccatacagaaatgggtttctggtgttatgacagggcctcactgtgggacccaggctgcccttgaacttgtaatccccctgcctcagctgcctaagcgctagaaggcaagtcttaccatgacaccttatggggcatctgactagccccataaaatctcttcggagcagagatttgtttgttctgatacctgaagagagcggttaccagcgccccacccctcctcttcctggctggtgatagaacacctgatgacagtgatgggggtgggggtgcttttcaggtccctgtgggtaccttggtgaaagaaggagacaagatcgtggctgacctctctaacctgggagacgagtacgtggctgctctcgggggtgcaggaggaaaaggcaatcgtttcttcctggccaacgacaaccgtgcccctgtaacttgcacccctggacaaccgggtcaggagcgggtcctctacttggaactcaagacaatggctcacgctgggatggtatgcccctgacagtgccacaccctgagggtgagcacactctacccaggagagaatgctggctttcattcatcgcccctgcccagtgctctgtctgtctgtgccagctgctggtggcattgacagtgtcctccatgagaccacaggacacttttactttgtttctaggttggcttcccaaatgctgggaaatcctctctccttcgagccatttcaaatgcaaaacctgctgtagcttcctacccgttcaccaccttgaaccctcacgtggggatcgttcactatgaaggccaccaacaggtagcaggtagagcctctaaaaccctgccagaggatgagtttaaatggcccagtgattcaggagagcaattatgtaaccccgagtttctcttcccacttaaaaaatgagacattgttttccctgattgaaacaattttaatgagtctgttctctgtcaaagtcagcccctcccctcccagccaagaaatccgatcccttctgttgggaattgtactcttgagttgggagcctgaggagaggactgcctcttgccttcctcattctctcctgtggaactgggcggtatcagtcatgcagacagcatgtggtttaaaaagcctttcctgtagcattttaagaggaaaacttttttccagaagataatgtacccattaaaaatagcaagcctgctggtgaggttatttgtgcagcactttatatctgcaaagtgcacgatagtgattggtatccataatcaaattatccatagaatgcagggagccagctcccttttatgaactgtgtttgaagcctgggagacaggaatgtgttaaatcttcctcattagattaatccaccatgcctgtcacccaaatatttcagagcattttacagacctgagagctgaggtgcctcggtgtcgcttggcctgctgagtcacctgggggcggatgagtggctttgattcccagtgttccttgaaagttgtagaacatgagatctgggccagaaagggtctccctgaggggagtctcctgaccgcaattgggaggccgagaacaggaccctgacctgacataactcttacttctttcagtggcagacatcccaggcatcatccgaggtgcacaccagaacaagggcctgggcctcagcttcctcaggcacatcgagcgttgtcgcttcttcctgtttgtggtagatcttaccttgcctgagccgtggactcaggttgatgatttaaaatatgaactagagaagtttgaagaaggcctgtcagagaggtcccacgtgatcattgcaaataagatcgatctcccgcaagccagagcccgcctgcctcagctgcaggcccgcctcggacaggaggccataggcctgtcggcgctgactggggagaacctggagcagctgcttctgcacctgaaggagctgcatgatgcccacatagaggccgagctggagcagggccgccagcctctcaggtggtagtgggcacagggccgtgtgccccagggccagcgtggaacgggggtgggccatcaatcacaggaagcaaaagcaaccttttgtaaactgcgggccctttgaactcccgagactaagtacttgcaaatatatggatgtgtctgtgtctttatttcccaccaatttggggcaccctcctaaagtgccccctgccccctggcccagcgtgatggagtattctgtgccacctagtacctgaattgctccctgtgcttggtgtgcctgtcatccttgctgctgactggtttgctggagttgactcatttgtgctaattaacacctcattagtaggaggacagtgctgctggctgaaggtagcaaacactgctgccaggcggcctgggcaaacgcagctgagcagccgagccatggctgggcttctcatgctcacacctcagggtttgtggccctcgtgtgattgggtctgcccaccgtcccgcagagcagcaaggtcccacaccagcctctgtgtggctctctgctgtgccaccgtgtcagggaagcagggtgcagtggccatactttgttctccagtgccagctgactgagaacagcaagggccagctccttccctgttgttcccagagcgctgagctctgtgggggctgaacaccaaggcagccttgagcttcacgactgaatgcacccaatatccgaccaggcacgcagcctctggctgtgcctcagggatgcgccagccagccggttgtcaaccaaagagatgagaaccttaaatactggcagcgtttctgatacgtgggctcagctcagcaggatgtgtggaaaaatggccagagacctgtccctggaggcagggactgccaccagtctgccctgccctggccaaaggctcagctcaccacaacttacctgaacctgtgagtcagtaccagccatttttgccaggtgggaccacattgctcctccagacactgccctatggaaagtgaccccaggtggtgcagccgggaaccatgtgtcccagagtattccccagggaagttgatgccttagtgtggcccttagggccctcagaagtacaatgaggagacaagtggaaacgagggctcatcctttggggagacccctagagtaaggctagccatgctctggcacacctgcaggtccctctgtcgggtggggctgctgaaacagcaagcctggcctcagctttcagaagcaattccgttttcatcagcagctggaacacggggtccttttccgggaagctttattctaatgtcttataatttcaaaggtcctagcgttctggaggccagggcgggtctcgtgtctgtggcttttctctttcaggccactgcaaagggttttgtagtcaggccaggcctgagagcattaattatcctctgctggctttcatctttgtggccgctgtgctctggagacctcagaatgcctccctagggcctggagacctgggggtgggatggctcctcagagctgtcatatgtcctgggaaccaccaacagtccttggctgggactaagtcacacaggctgctgacaccagggccataacacagtgtcatcatcctgagaccaccccaggaggggtgtttctgaagctggcttccctcccagctggtgtttctgaagagaagaaaagttgacttagtctctccacaaagccaaatggtcccgtcattgattcacggatgagtgtttgctctcgtttaaggtcaagttattgctgcctgctcatggtgcacacatgtaggggaaacacttatacacaaagtaagaaataatgggggctggagtggcagctcagccataaagagcactggctgccctttgagaggccctgagttcaattcccaccacccacatggcaactgacagcagtctgtaattccagtttcagggcctccaatgccctcttctggccttcaaggatactgcatgcgtatagtgcacaatcctacacatgtaggcaaaatactcatccacataaaattaaaaacaaaaaaaaaaaacctgtgtcactacaggccagggtgtgacatggtgccaaagtgctcattgtcgtgtgcaaggctgtgggctccatccccagcactgcggcacacggtggtaatgaggcatggtcaaaggtcatcatcctcagttacagacacagtctgaagccaacctgaaatacacgaggggctatttcacattttgaaagagaaacaggaacagtcgcatgccatgtgtgtgaggctccagggctgtgcgcccgtcatggatacctgctttgaccacagtagcactagcatcccatcccgtgtgcgagactccaggtctgtgcgcctgtcatggataccagctttgaccacggttccactcccagaatggacttctgcaatgtcaggccccctccccattctgcttacaccccagccttgtaaacaccatgaccatgtaagtgtactgccgtctgtccctacagacttacatcctccagactccacacaagtagaagccagtgatggccagttacctgtgcagcacccttttgtggggagtggagttgagagtttctctgtgtagccccaactggcctgggacccactctgtagaccaggttggccttaaactcaagagatccatcctcttgagtgctgggactgaaggcgtgagacctgacacccagctatacaacaacagcttcataggcgcttactgtgccatttctgagatagctactgccgccttaagttacagaagggccacaggcagcatgggactgagattgcctccagggcagggcctgtgattataagccgtttcccagcaacctcagtgtgtctgagcccagcaaggctcctagctgagtgcctatggatgtgggatgaatgagggtgacccgccctgggttcctcttcacttgaaagactccctgccctgccctgccctgccgttagctggataccatgcttccctactggccacttccaaagagctgtttgggcttccaatgaccatttgggatattgctggcctctcccccacagtagaccatagtctggacagagcattggaggggctgctgtgccatggcaagctaagctgtcttagagcacacatctgccctgtgttgttccccaatcactcctatgtttctggattcttaccatcttccaacatctgtccccactgactggtgacatttcccagacagcacagcaagccagcttccctctggtcctgggtgttctctctctctctctctctctctctctctctctctcaccacatttgcctgtggggtctagcccgcccttgctggggctccacaatctgtctcctggtgacagtcatctaccagtgattgtgtatgggcatctgctacaacctgtctactgccaggcctttctggaagcaggactgaggatggagcccaagatttggggtgcagagttccccaaagcttcccagcttttggcccgacccccactcaggcctggcactgttgatccagagctgcacttgcatgcgcttgctccaggagccaagcctccaggtttgctgtcagcttatcctcgctgctgccaccaggctcctcttccacttgcccttctctacacagagattcccctgccccatttgtttcctgttttcactggagaagacacttgtaccccaggcaaactgagggctgggtgcttcaggcttcccatttagaacctcacaggttcccctatggtgatgctagaacctcacaggttcccccgtggtgagccacagctggatggcaggcgacatggaactttggctgctgatggtaagtctagcttggctcccacccttcttgtctgggtgcctgtgtctgccctgacaacaaggagattctgactaggccttcaagagctcacactctgccctctggtgccactgtgcccagcacatagcccatcctgggcctcctctgacggagaagcccagcagaggcagagacccaagaagtagtatggggcagagacaaactgtctacacattaaatgagaccagaaacctggggtccgagtggcacagaaccttgctccctcttaaaactctgggaagggccttttcagagttggctaccccagaccttggcttatgcctgcattattttaatccctgcttctgtcttcatggaccatctacccaactctttcctccccactttgtggacagggtcttactatgtagcatagtctatccccaaatgcataatcctcctgtttcagcctcccaagtactggtattctaggtgtagggaccacatctgacattctctttttaaagatactctcgttggacttaggacccagtctaaatccagatgtcctcaaagtcctaactgaacattagaactcgaggagcagcccaggtggtgaagggcaggcagcaggagaggttgccagagcctacatgaatggaaagcaacttagagccccatgtttgcctaatattaggcacctgtgaggaaaggaacgcgttctcaggcatagaggagacatacctgcagcctgagcaattgggaggccaaggcaagaagattaaccctggactacatgtcgacctctgtctagaaacaagacatgctcctcaagtgtacagggacagctgcacagcatgacactcgacaccactatgagcaaatggggttggtgttgatccggcactacagagggaggtcagccaagcggagcacgcatggcctgcacctgcatggaatggggtgcgtgttaaacgaggaagcagactgatgtcagtctcctagcttgaccctgcagctgctgaccgtttgtctgaggctctactaggaaccaggtcacgggcatgtggacctctatgcatatcactgtggcatgaggatctggaaaaccctcaaacagaagagtttagtgaggagctctggaagagggcccagctgcagtgctcacctggccctcagctatgcttagagctgtttgctgagaggatgagcctgggagggagcccaggggtaaaaaagctgcttgcaaccaactgccttcccctggcatctaatgggatcctctactaagacgcctgctctcaggatggcactcctgggtgaggaacctcatttgagcaagccatggggatcatagaggagaggttggagttcacagtgaattgaggggtgtctaggttatggaactgtagaaagtctgtggacctccccccttatcactgttgtatcttttatgattggaagcactgggggacattcaaagttatacttggtccctgtcttcctttctgtctgcttcctggctactataaatgaccccacttgatgtctgccaaggataagtctgtctccacactaaacccctggaactgagaccactctgtccttcttcccttggttagctttggccaggttttctctcatattgacataatgtaactagtacaaaaaactggaaccagagaagggggggggggtcattacctaaactaaacctgcaactgttttgggggaagaatttacaagtgtggagatgtgtgccagagaagacctagatgctgtaagatgagcttgtcttgtttcattttgttgcaactgggtctctttctgctttatatcggaaaggtccttgtcttagtcagggtttctattcctgcacaaacatcatgaccaagaaacaagttggggaggaaagggtttatttggcttatacttccacactgcttttcatcaccaaggaagtcaggactggaactcaagcaggtcagaaagcaggagccaattcagaggccatggagggatgttctttactggcttgcctcccctggcttgctcagcttgctctcttatagaacccaagactaccagcccagggatggtcccacccacaaggggcctttcccccttgatcactaattgagaaaatgccttagagttggacctcatggaggcatttcctcaactgaagctcctttctctgtgataaccccagctgtgtcaagttgacacaaaactagccagtacaattgacccctagtcaacttgatacacaaacacatcactagtaagcctcaacccttacattcttattcatccccaagatctaaataactttaaaagtcccacagtctttacatattcttaaaatttcaatctctttaaaatatccatctcttttaaaatccaaggtctttttacaattaaaagtctcttaactgtgggctccactaaaacagtttcttccttcaagagggaaaatatcagggcacagtcacaatcaaaagcaaaagtcaatctccaaccgtccaatgtctgggatccaactcacgatcttctgggctcctccaagggcttgggtcacttctccagccatgccctttgtagcacacacgtcatcctctaggctccagatgcctgtactccactgctgctgctgctcttggtggtcatctcatggtactggcatctccaaaacactgcatgaccccttcagtcctgggccatcaattgcaactgaggctgcactttcaccaatggccttccatggcctctcacagtgccaagcctcagctgctctgctcaactccttcatgccttcaaaaccagtaccacctgggtgacccttacacattaccaagtccagccacagcacaaggtacaactttggctatatctggaacgcagccgctgtgctctcagaaaacacttcccagaagatgtcacctcaatcatgctggtctcttcttaatcaccgctaatttcttaactccagctaaccagcatcaatagtcccagtaatgcaaagtttttgctttggtagttctggtatcttgttaatcacagctgattcttcagccccagctaaccagaactacagaatcttcacaatcaaaacagcaatggccctgaaaagagtctttagtttttccctctgaaatttcacgaaccagatctccatcttctgcagtgttctcaacattatcttccaagctcctacacaacatccgacagagctcttaacaacggatggatcttcaagcccaaagttccaaagtccttccacagtcctccccaagacatggtcaggttgtcacaggaatacccccctctgctggtaccaatttgtcttagtcagggtttctattcctgcacaaacatcatgaccaagaaacaagttggggaggaaagggtttattcggcttacacttccatactgctgttcatcaccaaggaagtcaggactggaactcaagcaggtcagaaagcaggagccaattcagaggccatggagggatgttctttactggcttgcctcccctggcttgctcagcttgctctcttatagaacccaagactaccagcccagagatggtcccacccacaaggggcctttcccccttgatcactaattgagaaaatgccttagagttggacctcatggaggcatttcctcaactgaagctcctttctctgtgataaccccagctgtgtcaagttgacacaaaactagccagtacagtcctgttctctcgcttcctcccaagggctgcccttagaagagccacagaggcagtcatctcagtctgtttatctgagacaaggtctcgctctgtaaccctagatggcctggaactcactgtgtagataaagctgacttcggacttagagagattctcctgcttctgtcttatgaacatgggtcatagttctgcagcagtgtgcctagttctatgaattcgcctcccagtaggccttctagtgagagttcattcgaggcacgggtcggggggggggggggggaggagggtagggcgcagaatgatggtaggaagtgggcagagagactgtactgatgtactgatggtgtttctgggagagagaaagacacagggtcttcattcatatacgttctttatgtgaggatgaatttaaaaatcaagtttcaaccctaaaggcagcccagcctccggggttgtggcaggaattttgctggctgcttttagccatgtttacattgagagtttagggctaggcatggtgacctcagcatttgggaggctgaggcagaagagttgtcatgggtttgagataatcctgagctacagagggagaccctgtctaaaaaaagaagaaaaacctaaaacaacaaactttctgcaagaaaggcgataggagaaaccacaacggtgaaatccaaactactgtggaaactccaggattgtggagatgccagaaatatggactgactgtctgtctgctgaggaaagctactggcaatgagttgaaccagtccaagagagaggccatgtgggctgcaaacagagcccaagcagaactgcccacgtccactgtagcccatgcaaagataccaggtgccccaagtgccagtgaaacacagagatttaatgattttttaatgcttgagcttctgggtttaggtctcatctaatcctctctttgattcctttctcctcctcctcctcctcctcctcctcctcctcctcttcctcttcctcttcctcctcctcttcctcttcttcttcctcctcttcctcttcctcctcctcctccttctagatttattttatatatgtgagtacactgtagttgtcttcagacacaccagaagagggcatcagatcccattacagatggttgtgagccaccatgtggttgttgaattgaactcaggacctctggaacaccagtcagtgttcttaaccactgagccatctctccagcccttcttctttctttctttctgtttatttatttatttatttatttatttattttagacagttagcccagaccatcctgaaactccttatagctcaggctagcctcaaatctgccttctgccttaaatccccaagtgctaggattataggcgtgagccatacctggctcctgttcttcgtgttcttttttttttctgtgacagagtgttaagtgtagtcaaagatgactttgaagttctgcacctccagcctctacctcccaagtggtgactcagaggccatcccaaaacagggcgatgaggccccacagagctaaatgtaaggaagaactggctctgtggagaggagcctatcaggctgggctcaagagggacacaagaagatggtcctgaatgctaaacaaattgagacgtctccacagaaggagacagctgcagctcagccttttaccagctgtgggacattttgctgcctaaccccagcttcagcatctgtaaagggagaatcagagaagctgccatgtttgagtaccagagttcaagaaaagggatcagaacaacaaaaaaaaaaaaaacaaaaaacaaaaccaggtggtggtggcgcacgcctttaatcccagcacttgggaggcagaggcaggcagatttctgagttcgaggccagcctggtctacaaagtgagttccaggacagccaaggctatatagagaaaccctgtctcgaaaaaaacaaacaaacaaaaagaaaaaagaaaagggatcagagtatggtctgggggcacagtgtccttggtgtcattgtggcctaagtacagtccttggtctggtaccgtggtaacccttcccaggcagggacagggaatggtctgctcaattctctgtctcttccctagcctctgtacagccaaggcctcctccagggttcccaccccagtgtggtcatccacgtgccataaggcctggacttcagaattgagatgtccctctgttctcattggaccttaaggaaggaaagggctctttggttctgggattgaagaacctgctggggccactcagctagaaaacagctagtcttccctttctgtcactcctgtgcttgccccactgtgaagggacagagagaagcagcagaaaggtggcccctccaggtaccagctgtggaccttcccctggccgggacccaccccctgaagcctgctttcctaaagggaggtgagacccaggcacttaatgccaggttagcacagcactacccactggcagcaggtgcaggcactgccaatagtggagcgattgtggtaatgacaggaggcctgcagcagcccaagtgccactttctgctggcgggtggggtgggggtggggaggagccctgccactcacatttcaatgatgctggcacctggccgccccaagcccagctgctgagcctgagctgcagaggagcaaagcttagaatccctgattcccctcccccaccgggctgttcatacagacagaccaggatgagtgttcccctaaggtgtgtggtttctactctaaccctcaacacagaccagctggggaggctcaggtaactctcggtcttcaagtcacagtgtcctttgaagcacttttgccacgtgggcagctgagcctcgattccacagttgttctggtctcttcccacagcactaacccgcagcttagggaaggcagaaaccactctcccatctccgtgtctcagcacagggaagggtgtacagtgagtggccagcaagtgttgctttgctcttcttttctctctctctctcttttttttttttttttttttttttttggttgggggatgagattcgagacaaggtttctgtgtgtagtgctggctgtcctggaactcactctgtagacctggctgtccttgatctcagaaactcacctgcgactgctttatgagtgatggtattaaaggtgtgtgccaccaccatccagctcaacacatgttttgacctggagaggtgactccattggtgaatgcttgcttggtatgcttgaggctctggctttcattcccagtactacataaaccatgcatggcagcccatgcttagaaccctataaccaggaggcggaggcaggaagatcagaagttcaggatcatcctcagctacataacagaaaccagcctgagctacataaaacctcaccttaaactctcaacagcaaatgccttgtgttaagatcaacagcatcaaactgggcagtgatggcacacacctttaatctcagcactcaggagacagaggaaggtagatctctgagttcaagaccagcttggtctacagagtgagttccaggatagccaggactacacagagaaactctgtcttggaaaacaacaaaaaccagccaaagatcatcagaacctttctcaggaaccttgctttccttcccatacaaacccctgctcctggccccgctctgcactcagatggtaggagcttggatgctgtcttccaggacagattcctgcagagggaccagctcagacactgccatccatggtatccagagcacagtactgctcagtactgagcacagtactgctcacgaagaaaagagggagtggaaggagcctgggctcctcatcaggcttggcttcaaatgcaggctccttgccgattgccaacgtatgacgtggggcgagcctgccgaatggagaatgcgcacagtcctgtggggtcgctctgaggatatggggtgctaaccttgactcaaacccagcaagagcactgttattaactctcagtgaaaggttccgtacgccccagaacctgcccagaagctctgggatgggacagagaacagagaagatgactcttgtataacaggtctcaggaagccttgccagagagaccccagccatccccactcacagccctggctctgagtcatcttcttctgtggaggaagggactgggtaccccagtagcttaagctctcccttcaggctgggaaggtccccagctcgtgtgtgtcagggcctctccccatggagcatcttcagagtcagtgccaagagtgaagagatgtgcagtcagggtcaacacccaggggacccactcctccaggtggccctcagcctggccatagccctgacttagaatccaagtggaagtctgtctccgttggtgatccctggttggtaactgatccttctcccagtcctaagacaactctgacctagaactgcttatctcaggggtcctttatctgtcacctctggctcagggcccacatctgtgctgctctgctggcaacccatctccctggcaccagtgcacagtaggtgctcagtaaacaacatctgtgccactgaactccagcccagctctgtctcctcgaggctgggactatgggagcggctggctggcactgcagagggccccctcctcctgtttgtttgctgcacacgcgggcccaatagactccgtgtctttcttctctcctcctccgtccccacacagtgactccgggagtggcagtttccagagattgaaggcaaaattgcttgaaagcctgtgcttttatcctccaatttgtagccatttagtagggccgggcggaggggcagcctggccaccggctatgctggaagtaccctttgtcctttctcctttcccagatcattctgggctttggggacagatacccgctgaggagggaaggcctggtgcagtgtgagggagccagtaccagcctgttgggggagccacgaaacctcttagctctcagggacaagattgggggtggtggttgctgagcagatgtggtatctcctctcaccactcccaactgcttaggataaggcccagcttggggcagtgaggcacaaggtacactgactgtgaagggagacccagaatccccaggttcacgccacaatccagcgactgaggaggggcctgagtgattcgaggaaggaaggtcatgcttgagcccagaggaagccagactcaaatccagggaaagacagaagagggagggtctctgccttttgggggttgtcaagtagctggggaagacaagtgctggcacagctgcagggactgcacatctggaggaggacaggctttgtgggttgcctcccctgtgcagcactgagctaacctgaagctttactctggtgtccctcactgcagtgaagaccccagggtgtctagacatggtggcagcatccctccctgctctgaggaggaaaggtgaagtctctaaagatcaaggtcatggtaaggtgacagccagggccaggctgtcctgctccgggtggtgaggctacccataaggctgtcctctgggagcagtaccgcccaccttccattggtcttcttcctaccatccccgaccttcaaacacaaccatcaccagatttttgcctgcgctggtgactctgcatctctcacgcccacaagcccagctgcagttctcacaacttcggaggccctctgtggccccaccagccccttcgttgccatttttctgagcttctctcaaagcatgaagcatggttaaggcccttcctggggaccatgtcttgccagcacttggctggctactcatgtgtaaggtcaagggcatgacaatgaatgctttctgacatgaaaactgagcacctaccttggaatggctacagatctgtattctatgaaccatcccagtactatataccaccctcctgaaagggggtacctgctgggcctcccccacagatcctcggggagtcttacaatgaggcactgctgggaacagttccttatgggaactacaccctgggatgacagcctggcttttcttccatctcagttagaatacccaggccacatcctcggctccactggacctctgattagagccctgaacaatagctacactcacaaagtccccaaaagtcagcacccataaaaaaatacactttattgtgtcttcacattggcagaggcagcacaccagggcacaaggattgcagagcatgcagaggcctgaggtaagtacacaggacgaggcaaagcattcctcccaggtgtcgagaacctgctctccctcctgctgactgtcccatgagccgaagagccgctctaccccacaaccaacccacccccaaattctgactgcgcagatggggcaagcagggcagggctatcgtcccgagcctgggggtggggcaggcagaagcagctggcgcggctcagccggaagctgcagcgccgagggaggagggcgtgggagcccacacctgccaatccagccccgagctcctcggcaattttgtctctcttgattaaacatccaaggaacatcaagttcacagacttgatgttttcttctcctccatcttcctgaaaacatccagaatggaagagcagagaagcttcaaggttcctggggcgcttgacacttcatggggcaaagagttgaagggagagggggttaggagctgggctccgggattaaggaagagacagcggcagcaaagggcatcgccccagatcgtcttgggagagagaaggtattgcaagtgtgtggtggaagtggcaggtgtgtgcacatgcagggcgcattgccagggcaggagctgggagcacacaccaaggtttgcattagggaggacaccaaccactaagtatgcaaaggaggacatcactggcactgcactgagtgtgtggaggtggaaggcatgcctgggactcccggattgtctcttctggggtgaaggagaatgtggcggcaaagccagccagcacactccagttccaccaacgagggctcttggccctcctaccatgctgccccactgccgggttgatgctctaagaggctgccatggcatttggagcagaccccggacaaaggcagggcccacgctcgggctccccctcagaacaggtacaagggcctggccgtagaagggtggggcagctgctcacttccagcactgctccagggagccatggggctggaccttgagcttctgggggcagaggagcttggtgaaggctctacggaagctgtagtggcacagtgggtagaggacggggttgacggccgagttggcccacagaagccagaaggacgtctcgtaccagtagtcggggacgcagtggccatggcaagcagcccggatgatcatgaggagtgtgtacggggcccagcagagcccaaagatgctcacgatgatagccagcgacttggctaccttcttgtcccgcgacagccgaaagcgctgggtgatgctttgggataccatcttcatgcgcttctccaaggacgctgaagacgctgatggcttggagccccttttgagtgagcgtggcctctcagtgccccttgaggagctgccggagctggaggtaggcgaggcagcagcgcctccaccgctgccacccccgaggccagcctccccagtctcaacaccagggcctgcctcacccaccccatacctgtgcaatggcatggcctccccgtgcccctttggccagcagccccagcagctggggggagctggaggtggcgagggttgggcatcaggtgggggttctggaccagcctctcggcccccatccagccgaagacgagtgcgcctctggatgttcaggtagatgctgaggttgaagaaggtaacgctgaggaagggtgtgaagaactcgagggtggaggccgtgatgagaaagtaccagttgtagaagaactcagcatagcagtggccctcggggatggagctgccaccggacaggtactcccaactcaggatggcaggcccatacagcaggaaggccagcacccacaccagtgccatcttccgaacagcccgtcttgtgtccccctgctgggcccggtaggagacctgcagtggtttgtacagatcaacaacaggtcagcagcattggactggaggatcagagaagcctcagcttccgtgtctgctctgggtaaggtgccatgttccttctctcccctgcttgtgtcccctgcctgcctgatgcccacacattctcccagagcctcagagcctaccacaaccaaccagaatcctgtctcttcatcatcctccaccagctccatggggtccccctgactttgcttgtgtcattagcactggccacacccagaggccacacacaactgtttctgatgtgaggcttcttgcaagggccagagagctgtcttcaacggtttgctgtgctgaaagggaagggctttgtcccaactctgcaccagtatttccttcctctcactactggagctgggaatacagaagggaaacctgctggcccactgctagagactcctcccaccccaccccaccccacaaaaattaaatagtctgtcttcttttctagaaggtgaatggctagaaaaggtaggaaggtgggaccatctagtctttttccaagaaacaaagtaagctccaagtgcgctgagtaagcaaggggaagggtggcaggaggggccaaaaatcctgctaaggggcctcagagggacagctgagacaagtgtccttgacagccaccttgggaaccacacaagctaaccacaggtctagggtacacatgccacatgccagcactgtactgggcaccttagtcacaatagccctgtggttcaggggatggtacaggggacctagggaagctcaagagggctccatgctggtgctctttgcaagcatcctcaggatgcatcctgacaaaacctgaagggagtgagccactgagaagaggagttggggaagtgggagatggacccccactccacaccagtgtcctcctctccctctgcctgggtcccagagctatcttacaacagccatttaggggagcgtgtgcagttagggactgcggcttcctggtgttatgtgagcacgccttcatgcacacaaaagtgggaaggatgaagaccctccttcagttccaggaatcctgtacctgtccaggatagaggatggaccctgacacccctttctgcaatagtatggaattccaagccaacctcctgcctcatgctagtactactactggcagccaacggtcacagaaaaatggcccaccggtcaaaagggagcaagaccatctgcctataactcaggagcagccataccctgtccagtgctctccgacacacagggtaaactctaatgcccacatcccagaactcacagctcgagtgactgacaggaatcggtcatagctgatcagcacgatgttgaagactgaggaggcacacagtaggtagtctaccaccagccacagcttgcagaggccccggccaaaggtccaacggccggtcagcacatagggtacatacaatgggatgcagaaggcacctataggaaagcagctgtggtgggaccatggctcaagagctggggtcagactgaccacatagagaaagggcagagcctggccttcatagggtagccacctttctagggctagtactatatcttatttatcctcctagtcaccctgtccccctacaactgagcagctgccatcctccagcccatcaatgtcttctggacctggtggcaggaggaaggacctccacatagggacctctgaacacaaaacctgggcttctgccagccccaccaaccgccaaaagaggaaaatgggatatatgtcctccctggcttgattggctctggagccgatcatccatctctaccctggctgttggacagcctcccttctcagcttaaaaaccgagaaagcttttctcttggcttaaagggttcttggctgcagccgcgccagccgctctcaccgcccaaaccggcttccagcgtctgggagacgcagcagctcgcagccccaacaggtgtctggcgctccggcccccaccgcgagccccgccccccctcccccagttgggagcagagcttggacacgtgagaacgagctcctcggagcatttccctcatctcaccccccgccttccctacggtccccttccccagcacacctccccaaatcccccttccatgtcccctcccccccagcgtcctcccagcatcctgagtccggcgccgctgcctttgtttggttcggcgcaggagccaacgctgcaccggcggtcgctgcgccttgcgccttgctgagcgcccgccggctggggcagcctccccggggacatccctacctagcccccgtcttgcggcccgggaggcgaggaacttctcccgcgcccaccatcctaaggtttctagagctcctctcccaaggccgaacccctgagaagccaccccaggtcgaagcgccaagccccattgcccagcccgggctccgcgcccctggactctggcagcggacagggtctgggggctttacccacgaggaagtcggagatggcgaggttgagcagaaagaagttgttctgggtgcggaggctcgaatccgccacgaaggcgagcatgaccagcgcgttgcccagcactgtggccacgatgagcagcgccatgagcgcagccaggacagcggtccaggcagccgagaagccgcgcgccccgcctgcagccgccgcctctccggccagagcgcccgacgcgttcatcagcccgtcgggcggcgcgcgctccatggcccagcaggctcacagggctcggggacactgggcagggcaggggccgagtgctgggtggccgggcggggcccctgctcttgagcctaatctttgccggctcttcacccagcccggttttccggggggcgcccggagcatggtccgcgggaccggagcgagagccgagtctggagtccgggagggtgatgcagagggggctggtatcggaatctgagcagagtggggcgggctgcgcggctgctgcagcgagagcaaagccgagctccagccgcccgcggcgcgtcggtgcacccctagctcagcgcgcagccaagtgcgccccgcgatcggcccgccgccccccgcgccccgcgcagagcccccgccattggctggcgccctcgccccgcctccgtcccgcctccgccccgcccggcgcgggcagcaccacggacagcgccgcgtgcccgccggccgactagaacccctgccccggtgcgcaccgtggctggcggagagcccgactcgggcaataaccagctacagggctgggaccatgtctgaggtcgcacctagaagctggtcccttggctatccgttcgccctcgtgccctcgcccctggtgacccctgcccgacccttgtccgtagctcctaagcttgtcaggacctaggacactgcccgggtggggtggagaatggctgccccgcagctctagggaacttgcgcctcaggactccctttcgcatcttgctttgggcaagtaggtttctggggtaagagatgtccaaagaaagattggggaggggtccctgaaagtgatgccgggaacaggggttctctccagcctcatatgcacagaactgtggggtctcaatctccacgtggttagacagagctcagaacagggtccagggtgacctgcaaggcacacacagatgtggagttacataagggaagaacgagcctgagcggacccagcccagagctgagaacattcacccagaactcagcggcagtgggtggaggggcgacccacaaagcagcttggttcgggccacgaatgccccctgagataccttagtggggtggtcactgctgcaggggacaggtgaggtcactgagttctgggtgcagccggggtggtggcagctgcgttagtgcctgtgggagggggaggaggaaagccgccggccccccttctctgacacagatactggaggtcaaggacagagtcagcagcagaggctccctgaagacagacagacacacccacgctctgacacacagacattcacattcagggaaacagccacccagcatcaggctgggacccacgaatagtcagacagcagacagacagagaacagtgcccgagggagaggggaagcagtgactgtcctctgtcaccaacagcacacatcagtggatgcctcaaagtggacagaaatgtagacggtatgagtgtgggggagggggaccccaggcaccgcttcaagcaccccacactgacagccagaggctggtcatgtgaggacctgcccctcccccaccccaagtggttctctgagaactttgggcagtggggactggcatttctctgttccagccttggggatgctggcaaagaggagcctctaccccaagcccatagtctcagccccccaaaggcaccctggaagcttctatgggggaggggtaaattccaatgtatcgtctccagaaagccttctctgatctgctcttacaagcaaacccttcggctcccctccacagcacactgactgtgtccagaggctgcactgggttcaggcacttaactagaggtcaaagtaacatgtcctggaactggacagcaagatccagctgaactggtgggtacaatcaagcctgcccttcaagcctgtgtgtggcctgaagggcttggcagggctcactctcccagtactgtgcagcacctccaaaatgcttctttcagctgctctctttcttcccgtgaaagtgagtagaaccggacatgttgctcagaaatctcagagccctcaggaaatggggttgggagggaatttaaagggatctttagatctcattaatggctgaatgtccccatcttgacacaggattgaggatgagagtcaataaaaatttgtaaaatccctataaagtcttggccagttccggtcccagtcttggttttttgttttttgttttttttaaagatttatttgtttattttatgtatatgtgtatacactgtagctgtacagatagttgtgtagttgtgagcttcatctggttgttgggaattgaatttaggacctctgctcactctggtcaaccctgctctctctgacccaaagacttatttattattataaataagtacactgtagctgtcttcagacatgccagaagagggcgttagatctcactgtggatggttgtgagccaccatgtggttgttgggatttgaactcaggaccttcagaagagcagtcagtgttcttacccactgagccatctcaccagcctcccccaccccccaccccatcctagtctaaagtgccctggtattggtcattattctgataagtggaggctgggaccctatgaagaactcaggactatgtgacatggagactcaccagctatgtctcccttccttcatgtgcgcctatccaggcctccatgaatgttgctgcttgttgcccacccccagagaaccacctggagaccacttgggacaaagagcagttccctggtggtttgttactattccagcagctaggtggacccaatttaaccctattcaactccactgccccacagctgtctatggtgctgctgtgctggtgtcatggaatgttcaacatacattaaaaacaaacgaacaaacaaacaaaaacaggcagtatgcatcatgtcctacaagccagatccctgcacactcctagagattctgacggggccaagctccataacgacacttaactaggatcacttcagaccctagcattgaaggttcagctatgctcttggaggaagctacccagtctctgggagcttggaaatcttcctccacaaatggaggccagaagaagcaggaaggttaagttagcccagaggtttgataaggacagtggcggtggttatgggtgccccctataggccagactcactgcttgtatgcatgacctcattaggctcccagacaccctatgtcagtgtttctcaacctggggattgcaacccctttggggggtcacatatcagatatcctgcctatcagatgtttatactgtgattcgttacagtagcaaaattacacttatgaagtagcaacaaaataattttatggttgggggtaaccacaacataagcaactgtattaaagggtcacagcattagaaaggttgagaaccactgccctatgtagaatcatctgcatagggccccacagacgtagagttcaccctctccagggccctagtcctggttcagccctgagatagagtctcctgaggccagtagaaatacaagtgtaagaagcatgcaggcagagaaacttgactggccaattggaccaaggcaatgcataagtaaggaaggtcactatgtggcaccctaccctggaggattttcccaggaagggctttgtgtaggaaaaggaacacaaggccagatgcacccccagagtgtaccttacagactggcatgttagcacaacgcagtggccacattggaggctcccgtgggccctaaagctgtaatcccatatgctaaactcttgtttttctgaatgcctggccacggacccatcccaaaaacaaactccaaacaaatagccctcatacctggtaatgagctaacttcgtggcctccttctcccggttcaggccacccttgctaactcagcctaagccacatgcaagagcttgcatagtccccgcccatgggcacgggtactgcgtatgcagcatctggccaagagactagttttctgcaaaagaggctaggagtgatccaagactagtagcccacaccctggaagaacatcataggctgcagttccagcctcctctaggcacacaggctggggacaatggccgatgaggatacttgccttcctataggatatatactatgggtcagaggcatttctacggtactgtacttgcaggggacaggcacagtgtctaggaactggagttggtggggggaaaaagccaccccccaaatccctttcaataacccatcagagaatatgttgttcagggatcgtctgggataggagtcctcatctctgaagctcctcgggccaagggacccgcagctaaggacatcagggagtggctctggccacctgccaaggtctctttcataggtcactgtcttcacctccagtcctgccttaactggtgaacccgacttcaactagggccagactcggatttttaaagggatttctcactgacaagatgtcactaggtcacagacatggagaggagaggaaggaaatggaggtttggggttggggatagcagcagaaaagggtgggccagtgtaaggcagccaggaagccagttaggctgaagcacagaaagacagatgggagggctttggaaggaaagggggtaggcttctcatgcagtgggcaggatgctggtgtttccttggaactccgagagtcctcttaaaggttcctggccacagtggggttaactgggagggtggagggtagatgcccagagccagctggaggcagttgtgtaatgaagtccaagtggggacctgaagactttggatgttttttcaagcctggcataagctgtgggaggggaggggaaagaggtaggcccagcctacctccagagtttagggttcaagctctccacagggcagagtttgcagccgtgtcgtggagctgagtgggaatctgggtgttgggtgttgaacgttacaagactgaggtgcagtcacactcaaaaggatagctggaacacatggctggggaccaggggaggagcagctctgggctgaagaagccagtgcaggtcacggcctcagcttagctggtgccatcctcccatgctgtcccaggcggctttctgcctccagctcttttcctcgttgccagaaaagacctttctcccttgaactaagggtgatcctggtgcgactggctgcagagcttttgcctgtgctgtgtgggaacactgctcactaatgagaaataacgagagagaacaggaaccaccaagggctagttgaagggcagccgtccggcctgtagtgggcaagttgcttgccagggcctggcctctcaatgtttcatttcctcagtggacctgctgtctgctcccgcctgcaggagctcatttgaatatgggaatgcagatttttctttttttgttccttggctcccccctccccccaacccccccatcccgtgacattctgagccagctccgggtgcaccctgatgagctcagggcccaaatgtgataaaaaaggcgtctgaggccatgatgcagaacagacacagggtctgactctccatgtcacctttagggaccagatgtcagagaggaaaaaggagatgggagatagtgttgctgtttagttgaacgtgacaaagactaattcaagaaatccttaaagaaagacatgactgttgttgcctagggctcaaaagtccaggaaagatgagactcggggtgctcaaagacaaccttcttttccagcttacctcctctgtgtttgcctccttcccagactgtccctgaaatctctccctgcggctccctccagttcctgttcccttctctctgtcttaagagtctgccacattagtctgtttatgacagtcatgtagctgccctggccgtggtgtgggtgtacataattcaaactccataatgaccagggagaaaacagaggtggggagttgttggcaagcctggttgcaatcagttacctctgcagctgcccttgggatggccattcagccaagtagccagtgctggtatcaggagctcacacaccgtctctcagagacatgacctcggcagaacaggtactgtagtggggtcttggggcagctgtgccaagtttctgagaacctgggtccacactgcctatagggtaatacagagagtgatgtcacagctgacagtgaagctactggagaagctgttgtggcataacagaagacagagtcttggaaggccacttgtcccctgaggtgacactacagaccatgttagcactctcagagtctgggtagttgatgagtacttgtagctgtttgacctcagccctggcacctgcaggcatcttgtcctttgagtgctaagtccaagacaaccacacaggaaagccggagagaagtggaagcagccctactgcagagagcctccagggcttccaggcagaatatgggctggtgtggggccctatgatggtatggagcccagcccatggccagaagcctctaattctttccctggagtgtttagtgaagcctcccagactatgctgtgacaacattaagcctgcctaccgactcagccaagctccaaacctcttcatgtcagtgctcttctggggccatcagactgtggcttgttctaggcagctgtgaatggtgactgtcacacaacaaaggggcactggccagttctcagacctcttcatctctagagatggggacaggtgctatgatggagggccctgctctggagagaaaggaggcacagcctcttgtgatctgttcaactctgcctgtcttcactgagtcctctcccaacagcccagttagtacccacattgagctcctccatgcccttggcctggttcctgctaggtaggtctaagacattcctctgtctagagtctttggggaaggggaggtttgagacagggtttctctgtatagttctagctacctggaactcactctgcagacccaattgaccttaaactgagagacccacctgtctctgatccctcagtgctgggattaaaagtctgtaccgcaatgctgggcctctgtctgaactcttgacctgtgtctggctgtgtctggtaacctgctctctgttctggaaattcccatcttctctaaaggtctaggttccatatcctgtatgtttgactgccatcatggccttgtccagcctgaatgctttatcttctgatatctctgggttcctgccctctgcttgaccatctcctgcaccccactgcagtcactctacatgtgacaacaccatgacaaggtgactcttgcctctgatgtagaccccagtctgatggtgcaagactagatggtcaagttggggactaatcatatcaggctactccatgtagccaacgaatgtcctcttctcagcacctaaggtcatgggaggaccaggcatcccctgtccatttttcccctgtcctggttgggggagagtctgctggactggcccactgggcttgtcctggagtctaactgctgggcagaagagcactctacccagctggagcacggatgctagtggggttagctgttatgcaccccataggaaaccccctcccagtcacatcagggtcagccaaccagcaccccagagggtgccctcagggtttctccagggttccccattgtgccctgtgacctgtgtggtgctcatacttctgtgaatatgcccagcccccaacccccaccccagagttatgtggactcctcaactcctcttagagccctgagccctctctacagccctcagaaacacagtttaaaaaataaaaataaaaggaagttgagtgactgttggcttaggactgcttggaagaccctgccctctgtaaggtggctctgtttactcttgatgtcccctgggagtccaggcagctccttggggaacagatccctgccaggaaaatagagatgggaggaactgctcagggtagggctgagaatgcaattaatgaaggcgagtctttggctcctcaagagaggaaggatggggcctcagaagctggcggggtcgggggagagagagagggagtaggtagagagagtgtttgtgtgtgtgtgtaaggttacaacaggatgaatctgacctgagctgtagagacaagctggtaacaggaatatgtcctatctccatagaggcctaggatggctgggtgggtgtctgagatccttgctgatacctgcatcccacacattcatccatttatctgacatgctcatagcccacacagtcaggacacaacaggaaaacataacagggtgtctcctaaggcccccagacttgtgtaagacagtggggctgaggtgctggtggtgggctttggagtgaggactggcacctatgagggcttgcacaggttgctgacagatgaagctgttgctccacagaactcagccgggcggagctagtgcttacctgttccagttgggacaacagtggtcatgtgtgggaagcggcagtgctgagcctgataactgagaaggaggctagactctgtcttttgtttgtttgtttgtttgtttgtttggagaaagggtctctctatgtagaccaggctggcttttaactcacagagatccacctgcttctccctccccaagttctgggactaaaggtgtcactactcttgacttgtgtgacattttgaagggggatcctggccaggcatgcccagtggagaaagtgggtcatttcatccacctcgttaggaatggctggctttaggagcctaactgctaccttgtcctcttgactctgctctcctggcgagcctctctccttggggtgtcacctttaggctcatatctcaacacacagtccaggggtaggtaaagggtctgtactcaaaccctgcatctggctttcaagtgcacctgtctgaggtcagcctgctgatggggaggagtctaggtagctcctagatggatcctgtgcagatgaccgggtgccctcggaaggttttcacataccttcccaagccccaggaagatggaggcacacagagcaaatgacaggtaaaaacccatcccatgtggacactgggctctgtccttcctgggttgtctgtaggatctacttgcaccatctcctattgccaagggctcagaaggccaggctgctcttcaggccagggtattggggaagccctgagctaactctgtcttccacgggtgctctggggaggcctatccctgagtcactttagagccatggctaaggttgtcttggatttcctgacttctcccagccttggcaacacgaccagaatgaggccctttataagcccctccagatcttccccaaacaacctcaacctgatagcctggcccatccccatccctgcaggggataagtcacggagctggttggggaattagccattgcccagcccactccttctatagcgtggctgtacattttgctatgagaaggaaatgtggccgaagaatttcaagatagtgataccagtgcagtaaatccagcttgggtcttgcacactggcataggcttgcttccatggaggctcctggctagactagaacactgtgagagactaccacatcctctcaaccacaggtcaggagccagggcagggcacctgacctctgtggtaacccagcccggcacacaggcagtggccactaggtccttggctgtgtctttctttgttttttgttttttatttttgtttttgttttttttagagacagggtttctctgtatagccctggctgtcctggaactcactttgtagaccaggctggcctcaaactcagaaatccacctgtctctgcctcccgagtgctgggattaaaggcatgtgccactacgccccggcaggctgtgtcttttttgactgcctctcccaagatggggtaagggtgcataccctctcccagaaggactccagttaccaggttgcctttcccctatgtccttagctccaccttatggaggaagcatgctggtgccagggagggagggagggtggccttggctagccttcctccctggcctgggctactaccggaaagaagaaacctccattctctgtcctgagcctcatctctgctctccatctaggctccccaggcgtgtttaacctgcccctcccatccggtatgcagcttccctggcaccgaggcccagccagcggctccggccaacgcatttggctctcagcaagctaaatctaacccagcccagctgtcgctcctccagttctctcctgccctgccagttccctgcacgaggatgtgcgtatattcttgccacccgatatgggtccctgggacttgtggatcctagaccaggatccgggacctctctttgctcaggtgtattctgcatctgtgttcagggtccaaggcagggtcagtgtgtggcaggtgctcaggggatactgggaagaaagacagggacccatcttccatcagctccagtacagccaggaagaaggaaccatagttccctgggccagctccatgctgggtatggagttgccctaaagactatgagatggagtctggctggcatccgtcccacactggcccaggagggtatcgtggaattccattgttatgggctttagtgtatgtgtgtgtgggggttgaagtcccagcccctggggcctgggtgggggtggacagtctcagacactactcaaggtgaggccagcaggtaggcctactaggcaagtgaccactgtaatcatctcttctgagcctgttttacttaggccagtgacaccctcaggtagaatgcttcagccttgtcaaagtagcaggggatggtgtcctggctagtgaagtgtaagtggagaaatggatgttgggaaaagagagagaaacccactttccaccagtcagagtacagctgggaagagggacacactggttcactggctgaactttcctcagctcctggggcagattttcaagctgatttatcttgggggcgggagcagcaatgttatccttcctccctcttttcatcccttcctttctggttagagctgtgtgtgatgattagagcaccagccactgttttgggccatggcgtgacatgagactggaaggaacctttgttgagttatacagcaaagcaggagtgagacagggcagcttgggctcctgtcacatgggagcaagcacacttctattttgttgaagcctttgttattctgggcttcttcagaaatggagtgcttgctaaccattcctgaagggcaggcagccaagtcggctcaaatgtttccttcagcaaggcaggatgccattctagtgacctgtcaagaaaatctcagtgttcgcacatgctgggtctgagctgggctctttgcgtgcaggcgcctccacacactctggtcagccttgtgggggaggaagaagcgtgctggctttgaccggtttttcacacatccctctgatctcaggaaacagtagctaactagcaagtgaggcctcctgacctcaggtaggcagactcctgggggcctcctgatcacttgccatgagtagttgagcatttagctgacacaatccactctagggcactcagcctacagtggggcacacagaactgggaaatgagaaacgggccagtagcttccttggtgcttagaagggagtctgtggggcctccttttccacctcctctggatcctcactccttgacctctacaggacctgtcactaggaaggttgttagggtagcttcccaaaagaggaaggagtgttggggttagcctgggatggcttgggcttgctgtcacatagaaggaactttggggtgaaaagtttaatggggaacaccacttttcctgcttccttttggcagagtttaataggtgcagcttgttcgtgtcccaaagccacagggggaaaaagaataagaaaaagcccttttctgctgctattgataacttgtctcttcacgaggcgggttcaacctaaaaatacccaccctccccgacagggaagccagcatcgtcacgttgcagaggagacttgaaagttgactgagaagaatcagccgagccacgtgagccggtccaggcctctgtggtcaggctgcccactggcagcctacttcctgtccccacggaagattccatggcatggctgagaagagagctggaagtgtgttctgccagggacctgggaatctggggtggagatggcctcaggctggcttcagcagcaggggccaggtggggccacatacaaggcaccccagttcctggatgccacaccctggcccagctggcggacaaacaggctgagatgaagagatagcattctggcaaagaggtaagagtggagtgggtgaagggcagagggtgggtggttggtagcctgtccctgggcgagctgctgctcttgagccttagtttcccttctggaatggggagcgatcatctctgttctgcctccgtcaggggtgaggatggaaaacaggatgatggggttcgtgttgctatctggctgtgaccacccacagcgccagctgtggtcaagggaggccttgcgtgggtcttgcgagacacaggcagatggcccacccttgaggaaggggtagttcccgccctagtcaagaagacagagggattctgtcagggagcctctggcctccattctaagccctcagagttggcttgacctccaggatctatcctgtaatctcccacctccacttagcacttgggactggatgtatcctttatttataccatgtggggtggggcagcaccctcatggcatcccattgtgtcccaggagctgttcaggaaggaacacactccccaaacagtcctttggcacttctcagatgctgagagcactcaaagctacagctactcaggggtcctgtgacatggaatctgatcttgtggccctcagccatagccccttcaggaaactcagggcagatcctggtctggagtctgggcatagccagactgctggtccatcagacgtctctgtgccttgccctctggaggcattaactgggttgagacccagtctgacatccgtaaagtgggagcaatgacattcgtctccctggtcagctgctgacatgggggaactggaagggacatggacataatgaaacactttgggggcattttgactatcactatctgcactgtcatggccgggcgcagagccaactcttcctctttctacaccctactagtccatcctagaggacattgccactcggcgaagatggagagagcccctcccctactgacagggatgctgagccacccagccctgcacctgaggctgctgaaaggtggcagcagctcctaaagggggcagagagccaggagcagtgttaggtacctgtcagctcaccttttacctagaggtaaaagcggaagtgaggaactcaaggctctcctcagccacagctggaagacaggtggttggaatgccaccccggccccagggtcagcccatctactacacagcttgagtagggatgcccagcccaacctgggtggttattctgcccagatggcagggccctgtagctcaaagtccaaaaacaggttaggtaagctgtgtccctctgaggcttgtctcttggagaggggctgatcttggagatttaggtaagggtgtgggtggtggtgggtttctgagctagtcttggccaggcccccagaaaaactgcagaacctggtcagtctgactatctccgtggcaaccggctagctgtccttgtcctggctggggggccagctgccgcacccttccatcagccctcagcgggctggagttgctttcttcagaggtaaccatggcaacgcctttgtttcggaagcctggcccgcctccctctgtctctctctttaggagctgagcgtgcagggggctcttttccagtcccagcacgtctctcctgcgccagtgagaaggggccaccagaaagccaggctgtccctggggtgggagctagagaggcagacagggtctgctgggccactccgtgtttgcagaggacttgagtatctgcagagtgggccacagaggcggggggggggggggacgggacacgacacggacctgtgtgtgagtgtgagcaccaccttactggaggaagaagtgtggccttggagaagaatccttcattatgtgctgaagaaggttcatggggggcatttagaacccctttgctaaagcctcagactggcttagcaaaaaacccaagtaattactcaagtaactggaaagccttggactgatgtcaggtgcagctggccctggatgacctgggggacttggttcctccttggtttcctgctttcaaacgacctatagcggccctcacctcacttgcttctgggtaggtttgtgaaagacaagagacatctaacttgcttccctcaggtttgacactgagctgaacctcctggctaggatcggaccacaagtcccatacctttgcaattcctgtgccctgcaaagtcctatgcaagtcagtagccatcttgattcatgtcacttcacctttctcaaaccagaccccacattccaatgtgatgaggaggctggggaaccctggctacagagaaaactgagtgttcagagaggtcagatagcttttctgaggccaaacaggctgcaggcgtgtccccagagattctgagtttaaccaggagccactgcagaccacagggcgcctaagggtgttaaacaggatgaaccggccagggaggccactggaggggtaaactggccccagggtatgttaagtcacgattggcgcgcaaaggccggcggccacatttgccatttgttcataccccagcaaccgtgagaagcgtctgcggggtcgggagccaaagggtgggtctagcccagcgccagcctgggatcgttcacgcccagccacctgactcactgtttgtaaactagcctctcccaaggtcactccccttcctcctgcctccccttccttctagctccagtatctgcataaacccaccttctccaaggggtgattggctgggcgcgccgccactcccccgtgtgagccggattatgatagggccgagggagaagctgtccggagaacgtgatcggcatggttccgcccccggcgcggcctgcgggccgagcgttgattggccaggcggcggctgacggacggcgcggggcgcggcgagcggcgagcagcacggcgggctgtaggtcggagaggcgcgggccgcacttccgcttgggtgtcagagggttgccggctgcggtcgggggcggggcggccgtggggtcggcgactccgcggggaccgcgttcgggtgagtgggctgcagcggggcgggcgcgcggggacgggtctcggggaggcccatttgccacctaggccgcggctgggctcgggctggagagtcgcggcgctaggccgccgggagtgtggacgaccgcgggagggacggggccccgtggggctccagcgaggtccgcggtcgcacgcgagggactccggcgttctccctttgctgggcgagccgcgcatcccctcggggcgcgcggggaacttggtgcccgcgtggcctcaggtccgagggcctatgtctccacagcagagtcggagcgcgccttcagacctgcaccagcgaggcagccagggctgtccgcgctgagtgcggttggtgggccccgcgtggaggcggaggcaccggcggcggcgctctgtcccccttgctcctccgagacgctgcggccgagtggggcgcctcagtcttgagagttggacaagcttttgagttatgttcttgtgggtcggcctttgcacatctggatcagtggttctgtggggctctgcacacactcggaggaggccttcgtgtaggctaggctccatattgtcagagatgttgatgggacagctcctgagtgggagcctcagggatggggaactgctgaccctttctgcagagagcctggaccctgctaactgtcacctgtcatctctcccaccttcacttcttgcttgtggcatgtgacatctggtgtaccagtaagagatacatatgggtcagtcgtctgcagtgggctctgacaagcaacaggtgctccaaagtgttagttcactgatgtgagtaaggaaacaggaacatttgagtggacacattgtccgtcgcctcccattgcctctgatggtgccaactaaagggtgacaatgaggaaatgggtggctgcatgtcctccatagaatctaccttcctgtttgccccaggtactgtctggtaataacaactcttatctcaggggacgctaattttgagcaattatttgctctagatcattagaagcatgagtcttacagcagtcactaacattacctttattcccaaggaaaagagagctcaagtagcttacttcagagcacctagtagcaaattaagtaacaaaggtaccgaaacccagacttcctttttctctctctctttttttttttttttttttttttgttgttggtaaggatgagcatggccttatgcccgttgagataagaaagcagcctctttatccccagctttactttttgatattgtaatataattacatcatttcctccaatcccctagtagttcctctgctctcttctgtggcctctactttttggattattgttacatatgtatatgtgtgtatgtattatgtatccttaaatgcatgagttgtacctgctcagtttgtgtaatgttacttgtacttatatgcttccagggctgatcatttagtattggataccagtttgtgtgttctttacactcattttgttacttttgaggaggatctgatgtaactgggtaggctcaaatgtaattgagcatgaccttgaatttctggtcctccgtgttctggattacaggtatgcatcatagccctggtgagttcatattctttttgttgttttgtttttgagacagggttccactgtgtaacactggctggcctgaaacttgattttgtagatcatactgacctccaactcaacgatctgcctgcctctgccttctacttggtggacatttgaggccagcctggtctacataatgagttccaggatagccagggctacatagagcaaccctgacttgaaaagcaaaaaacaaacaaaaaaatgctaagtgaaaaaaatttttttctgctttgacacaggaccttactctgtagtccaaactgtctagacccacccccagtccatctacttcagctgggattataaaaaccttatatgaaagttaggctgggtgtggtggaacacacctttaacactcaagaggcagaaccaggtgtatctctacaagtttaagatctgtctagtctacatagtgaattccagaacagtcagggctatgtggacagaccctgtctcaaaaataccctctccctaaaacatactacatagatatatgtatatatatatgtgtgtgtgtgtgtgtgtgtgtgtatatatgtatatgcacacacacatacacacacatagggaagggagaaaaaagaaagttagtatggagttctgtttaagaatgtgtgttaagaatttaacgatgcatagtgacatatgccctttaatcccagcattcaaacaacagattgccctctcacaaaaaggatggaaactcacaggcaagatacatagctcactggggagaggcattttctgccaagcctgataacttaaggtggatcctgggtacctgtaaggtagaaatcctgaactatctcccaggttgtcccctgacctcaacatggacactatgacttgtgtacatacacatatgtatacacccatgcacatacacacatgcacatacacacatacacaaaataaaaaaaaataaattctggtttctttttgagacagggtttctttgtgtagccatggctatcctggaactagctgtgtagtctaggctagcttcaaactcacagagattgcctgcctttgtctcccaagtgctggaattaaaggcctatgctaccactacccagctaaaataaaattctcaagtataagtttaataggaatctataataaaggactggagatatggctcagcagttaagagcactgattgttcttccagaggtcctgagttcaattcccagcaaccacatgatgacttacaaccatctatctgtaatgggatctgatgtcctcttctgttgaagagtgtcttctagtgtctgaagacagctacagtatactcatatacataaaataaataaatcttttttttaaagatttatttattattatatctaagtacactgtagctgtcttcagatgcaccagaagagggtgtcagatctcattacagatggttgtgaaccaccatgtggttgctgggatttgaactcaggacctttggaagagcagtcggtgctcttaaccactgagccatctcgtcagcccaaaataaataaatcttaagaaaaaaagagaatggcagacttgaggaggtaagacaagagaaggtaacaaggggggtgaatctgatcaaaatacactatataacgtgtatgaaaatgtcagtgaaacctattattttgtgttgttaatatatgctaaaaaaaactttttgttattttttgagagagggacttatattgtagccctcgtgggcctagaactcactgtgtagatcaggctggccttgaattcagatatttgcctgcctctcagaatgttaagattaaaggtacacaccgacacccagcttcattttttttaaaaacatgttaatattgccaggcatggtgttaaacacctttttaattccagcacttgggaggcagaggcagaggcaggtggatctttgtgagttggaggccagcctggtctacagagcaagttcagccagagctacacaaagaaaccctatctcaaacaaacaaacaaagccattgaactttgatcctcctgtcaaacacttctggaaatgctatgagatctcctggtttataatggtaattgaaaatataatactccattttttaaggatttaatgtgtgtgtatatctctgtctgtctgtctgtctgtcttatgtgtgtacctatttcattaccagtggaagacggaagaggcattaaatccccctggagctgctggtggttgctagagacagaactcaggtcctctgtaagagcagcaagaacccttaaccaccaccattctttaggctttgtcattccttttttgattagaacatttttggtgccttttattctcctgtgctgcgtaaaatggagttgactgcatcttggagattatttctctgatggacagacagcgttgttatgctgtagccaggtatctggtgtgcctttgggtagaagttgtgtgacagctctcacagtggttgacgtggtggtgtggggttaatggaaggctgtggtaggttcctgggtcctggctggtctctgggcttttgacaggagcagtcactattttctcttgccttctgtgcctttgcctgaaaaatgtgttactgagaggaattaggtaaaatatagctatatgcatgtggtgacacccttggcttttccaccttcaaggtgagacaggcatgtaggaatgataccacacatgacatactgcggttggagaggtcagagagcctttgccaagcagatctgtgctctggaatgcattgctgtggaatgaaggccatcaagtgtgtgtcctatacttataaaaacatcctgaacacctcagggtatggttactctgacttgctgtgagcctctgaggtagcagtgagagtgtaagtcagtgtctccttggcatcacctgattccatttggatgtggacatctgatgtactgtttagcactaattttcccgtgcagggtttagtccaaaactcagtcagtatttgaacacaactgttaagcgtttcaatcatgggacagtgaaatggcttagagggtaaaagcatctgccagagagcccagggcctgaggacaatcccacaacccatgaaacagtgggccgactgaactgactccacagagctgtccttgggcctttacatgtgccctgttgcatgtgtgtttcccccataataataaataaccgaattaaaaaacaaatacttcagagagatggctcagaggttgagagcactgactgctcttccaggtcctgagttcaattcccagcaactacatggtagctcacaaccatctatattgagatctggcgccctcttctgtcatgcaggaaggaaacactctgtacttaataaataagtcttaaaaaaaaatatttcagggctggagagatggcttagcagttgagtgctgattgcccttccaaaggacccaggttcaacttctagcacccatgtggatgcttatagctgccagcaactcacataaggtgtacagacaaaacaccaacacataaatacaattttaaaaatacttcaaccataagagttaataatagttcaggcttgagtttaataatacttttggtgtctaggttcaatcctgaatttgtatctgatttctaagttttgccttttcaaagtgttttgttaacacacttccactgctggtattatataagtctcagactaaactactggtttagtctgaatctgcagccctttttaaacatgatcatgtgcttagtgtgatgtgaacttgttgacacttcccgttcttttcaaattcagaaaacaaagcggtggtcgcttggtacaacctccacacacgatgtctttcgctggtgcttttggtgatcacacttccacagcctcagtgctggtgtggtagtgagcctggaacggctgtgtgcactgttgctggctgctggtgtatgtctctgtctttgcttgctttctcctgcctttctctgccttccgttagaatacctggttgatttttgggaaacatattctgtgttctcttttaattggaaaaagactttgtattttaaaagagattggctattttaaagggattgaaattttaagaatttgcaaagactgtgggactttgagttatttagatcttggtctcttggtctgtgctgaggaaggatgggtataagcaggatgtttacctgttggggctgacagggcctgcactcggcttggatgctggcatgttctagacttgtgctaaggtatcaggtaggtagggttcctagggctctttagcaacagttttccagaagggctgaacgactactggtttggaaaaatacctggtaagtgtctatactggtgaatgctggagttcttggtgtaggagcagttacacatggagaacaagaggtctgttgggagcatgtaccagtctgctttggcaggtcacagtggatcacctggcaaacaagtgtaatctggctaaaggctagttgtagaccagctgcagcctggcaccttgtgtactggctcttgacagaaaatgaaatgctttaaagccagcgaaagggtgtgacacagtgtctcggagaccctggagagggaaaaaaaagcaccattagtgtcataagtgaggccaccccagaaattgttaaaggacttggttcagatctgggctgtatcttactcccatgagtgctccatcctagtgctgacctttcccagtggtgtgtagcaaagacagcactctagatttaatagttacatgcagccaggagtggttaggcaggtggggttggaaggacagaggggagcagtcctggctcagtgtcagcaaacgtggagaacgtgtgagcacagcttctggtctggtctcagacctctgatattcccagcccatttttggatcaaggatctttatcacgtaatcaatagctgagtcctctcgcttcagacgaaatgaacactgattgagtctagcagcttttctcctctcgttcctgctttgtcttctgtcaggaggagttggggttgatggattctctgaccttcacccttggccccagtgctcaggcagacaggatccagggtatgatctgggtaggtttggttttatcaggacaagtttttcagcacagtaaaaccagttcagctgcagactgcagagtgaagttgagcaagttgatgaggaaaagcctagagtgggagaggaagccagccaaatacagtgtcagcagggctgggagcaggctgatgcccgaggacatctcactcacgggtgaccaagggtcacccatctggttctgcagcagctccccttttcttggctcttgccaaagctgtggttttgctaagcagatggtcagtgaggtggggcggtggtggtgcttgggggggaaaagaagccacgtggagcagaggattaaccacttgtctgattctgctgttgtctcagtggcagacataagctgtggggagacccatccacaacttccccacccactcttttgagcagcttttgaacagttctcttctgttgcagcataatgatgactaaaacaaacatttttgtacaaaagctctgggctcatcttgtgtgtacttgaaatacattgtgttggattataagataatgttcttgaagtgtgtggtatgttttctgtgcttgcttgctaaatgtgatctagtgaaggaaggaaccttatgattagtgaactccagactctctttagaggtgacagtccccccacctcccccaagtggctgctgttaagggaccctgttgagcaccttcttggcctgcaattgagggccaccctgctggtgtggagaatggaaacagcaggcgattaatgctgttgctttccttgtctttctctgggcctagacacttcccatttcctgcatgaattcctaataaacttatcctctgtgactataaaacttgctcagcaggtagatgctaacaagacttgtttttgctgttgctgagtggaaactgaaggctgaagtcagctgttcacttacacagctctaagcacggttaggttttactttggtatggattatgtagctcctggcagaagccacaaatctgggaacctaaagaaagctgaggctctgggacagctaagtaaatctataatggcacctcttgtacagctggagttaactgtgtttggctaaagcattgggagccatgtttagtaaaggtcacttctggttccttccccaagactgcctgtgcttaaagcaaagctgtgtgatctgtgcactctcatcttgatgactgcaggccaggccaaagcccaccagctgctcttgcttctttcctaaaaaagctattgtgaaaaagtagggattgtttttgtgattctaaatttatacaaaatttgtaaaaataaccactgcatgtctaccatgacagggctcttcagacctttcatgagtgtcagcaaagagcattgtccagtgactgtgaactgagagctgcaggggggtttggaatgagagtggtcagtctctcatttttgtctcatcctggcggaaggcttggtctttgcgaattggctgtagcgtttgagctgagcttggctatgctgctgctgccccagcacagggctgggtttataggactggggagtctcctgcctcatttcctcctaccttttgggagctgtcaagaattctagggtcagtggataatggtttagcctgtgagtcccatgggccatgctgccttaccaggccttttagagtaggtggtgcatggagtcatgttgaacactcgttcctctctcacactacatttcctgtggcacaatagcttcctgggtattgcaaaatgacacccaagtgacagatgaagacaggcattgaagaggtgaccaaaaaggcaatgcagccaaaaagcattgtccactcaaagtagcctggctgtttgggagaggaatgaggaccctcaccaggcctggggctggtgactctagatgttggaggaagggttggggagtaggagcctgggcttcagctgcctctgggttgtgcaagtaaatgctgtgactatggaggccttgggatgaaaggtgctgtcgtgatacctatggctgccgtgtctggtatatttctgacatttctctagactcctatgtcccaacctacccttgagtgagggtggaattgtacatttggccttagcttagccattgataagacttcactgtttgaggattcctgctctgtgatgctgctatgtgatctcttgggacagagcaagttttccaggaacatctgtgagcttcctgtctgttttgaggattggaaactaacattttcctgcagaaactaactagagggtttctctgtgtagctgtgattgtcctagaactcactctgtagaccagactggcctcaaaatgacagagatctacctgtttttgcttcccaagtgctggaattaaaggtatgtgtcaccactgcctggctacaaatacttttttttttttttttttaagatagagtcttaaatgcccaggctggccttgaactcctgatcctcctgcctctacctctcagatgctgagattacagatatgtgagaaaaagtggctttagaatgtttgtattcctcattcgtgccttgtagagatcctatctagcttgcttctcctggttttaacagcagagattctcatggctaggtttttcagcaagctgatagtagctttctccaggttgttcatttaatgactcattgtccaaacttcgagatctcttccctccctctcctctcctcttctttccttttttttttttttttaattttttgagacaggttttctctgtatagtcctggctgtcctggaactcactttgtagaccaggctggcctccaactcagaaatccgcctgcctctgcctcccaagtgctgggattaaaggcgtgcgccaccatgcccggctccctctcctttcctatttgattgaggcaagtcatctttatgtagccaggctgtcctggaattccagctcctcttatgttgtgagatcataggtatgtaccagcatatctggctctagatctatttttattaataacctaaagatatattgtaagagtacagtgggagaattcatggaagtagtggggcgctttgggcctgattgggtcaggtccttagaagacaaagacagaaggggccaccttcagaatagcctgggagggccctttttgaaacagatggacattttttgggtagcagaacaattgttaagtgtcccagattggggaggggttacggtgatggtatacttggtgggccagatggaaggagagagccctgccccagcctagagtgatttgtggagaaggtggaaggccaaatgatgcccagccagaactaatctcctgggtgttctctaggcctcagaaagggaaatccctgactagacagcactgattaaagaaacaaggactccagagcccttcctgaagcagtccctatggaatgattcttagagcaggagagcctataggtccattgcccaggaggtaaggtctgtttttatctgctttatgtgtggtcttagctttggcagagagctgtgtcgacacacacaacatagctcttaggtcagtgggttgatcagtgggtgaaagcactgttgccaagcctgttgaactgagttccatctcacatgctggaagcaagaaacagctctacaactcatcctctgaccgttacgtttgcctgtggcacacacataccttcaccctacatatatatatatatatatatatatataaggataaaggaatggaaaaaataatctacagccacgaggattcaggttgccccatgtaaaatgtcccaatatagaagcagtgtcgtgaactttgtgtggttggagaacagttgcagaaaaaaagacagacaggtcttttactgaatacattggtggggacgtgaggcaggcagcacagcaaagcttaaaatgttctgctgtaggttatggtattgctgtctgatggtgctctgggcttttggttggtgggagcctatagtctgttaaaaatacaaagttagccgggcgtggtggtgcacgcctttaatcccagcacttgggaggcagaggcaggcagatttctgagttggaggccagcctggtctacaaagtgagttccaggacagccagagctacacagagaaaccctgtctcgaaaaaccaaaaaaaaaaaaaaaaaaaaagaatacaaagttaaaggggtgttaggtcaagcaacaagtgtgggcaacagtggcttttaaggggaaaagtgataacccgggatagtttggctctagatctgcaacactccaactctccacaatgggatgatctgatctgttcagaaagccagacatagtctcctttaacagaagaggcttatttgccaaatacaactttgcattatctgaggattttctgctgaatagaaaaaaaaccagaatctgtaggttacatggacttgggagccatgttctgaaccaggccctagagatgatgggacagacttgcagaaggtctgaggactgataggtgctgttccaccctgtgggccatctgtgaagtgctgggtaccttcatggccttaatggtgcccagccccattttcccacagatctttttttttttctttcgagacagggtttctctgtgtagccctggctgtcctggaactctctgtagaccaggctggcctcgaactcagaaatccacctgcctctgcctctgagtgctgggattaaaggcatgcgccaccacaactttaatcccacagatcttcttgtcagttgtggcagtccatcaagagagttccctgggaacgttggtgtagttggccatgccagaaggacttgccccatctctgtctgaggcccagcttctggtggcttaggtcttctgaaactagtgcagtggaactaggtttgacctgacagtacagcagtctcccctggcccttgagcagcttttgtctcctccatggcaacctgcagccatgctggtagttagaggtcagaggtttcacctacagttgtgagacgtcctgaggatgaatgaggagattgggtccttgaccttgtagaggcttgtgggaaagaaaggcctaccaagataggtttgtttgtttgtttgtgtgtttgtttttgttttttcaagatagggtttctctgtgtagggctggctatcctgggccttgctctgtagattaggctggccttgaactcttagggatccacctccctctacctcctgagtgctggaatcaaaggtatgcaccaccactgtctggctccaacatgggttcttggtcacagttggacactagggggacatatggcatcggtacaggccatagtaactgtagcgtcccagtagctgacaagcttttgtctggcctcactttttatgccctcattacaatgattttctgtaatttacttttaacattagaggttttgctttacataagaaaacatgtaaaaagaacagacctgcttgtagcatgttttcacggagcttttacaaacatagcaggaaagtagtacaagagtctcttgtttacctgtgtacagctccaactctctccgtccagcctgtgctgccaggagttctccctgattcttctgaagagacccacatgcatgtctgtgtacagctctagaacaggagaccccctgaaaaacagtgtcatgataccttacacataaacttgatcttcacactgctcaatgtccagttctctcactggcctctctgagtataaccttgtttgaatttggcttcaggcatgatattagtgtcgttttatgtgtatgttcttgaatgtatgttgcatatacatgcatcacatccatgcaggagcctgcagaggtcagaagaggtatcggcgggtctcttggaactggggttacagacagttatgaaccaccgaatgggctggatccagaatgggttccaagaattgaaccctggttgtcctcaagggtagtaagtgcggttaactgcagaaccatctctccagtcccccattaatgctgttttatttttgagactgggtctctctagtcctggatgtcctggaacttactatgtagactaggctggcctatagctcatagagatctacctgcctctgcctcctctgcctctcaagtgctgcagttaaaggcatataggttttttgttttttgatttttcaaagggttttctttgtgtaactctagctactggaatttgctctgtagaccaggctggcctcaaactcagaaatttgcttgcctctgtctccccagtaggataaaggtgtgtgtacaactaccacttgtattttttttaaaaaagatttatttattatatttatatgagtacactgtatctcttttaagacacaccagaagaggtcatcagctgggaattgaactcaggacctcttgaagagcagtcagtactcttaactgccggggcatctctccagcccccatttgtatcttttaaaaggtagctttttctccaggcactaggaattgatctcaggttttacaaatggtaggcagcgttctaccagctaaaccacacccttagccccctcaaaatacctttttttttttttaacttgtttgtggctttatttatagacaagtcttttgtacccaagctgtcttccaacttgctttgcagtcaggataaccttggtttcctaatcctcctgcttgcaccttatgctgggattgtaggtatatgccaccacaacaggcttcaaggtagcttttgaagtatgttaacttgtgccttcctgtgtgtatgtcacgtcccaccacggaaatattgctgttgggataatgcctgccctctgccactctgtcactttctttcctttctggcttgtttactggagaagcttcctctggcttggaaggttccagagtctgggcgttgctgtttggactcccacagtgtctagcacaatccttttctgagtattttcttaagtttgtggattaaaccagatgcactgctgcattttggtacgattttctcagcaggatggcattagttggccatgtgatccccccccccccagaatgcacaagcactatgttactgcgttgatggtcacatttgatcttggttgaggactgagaaacagttttactctgtttgtttgtttgtttgtttgtttgttttgagacagagtgttatacatcctgggctggctttaccatgtaaccaaagatgaccttgaactccatctctggagtgctgagattacagggtgtacggcgtaccggtatgggggatccagcccagacttccctatatgtttgataagtacattatcagctgagccacatcctctccttgttccaagataattcactggatacttgttaccagttacctctttgtacttgggccatccatgtctttgataggtctgttatgtgcatttcagtatcgaagttgccttttctttgctgtgggagcttttgatttggcctcttggttttgtccattttgtgctattatagtgataactgcctgcacagtaggcagtttatagtaaacagacactcgctgcctctcaattttggatactggaagatgcaacaaatggtaccagtcagtatctggtggggttgttcctgtggcataccactgtagaaggaggctgtgtaagggcagaaggagagacagaacataggcaagtgtgtctgtgtaggtgggagctgacatagctgtcactgggaatccatgccttcaggatggcactgattaatttgttcaccagggcaggcttttggcccagtcacctcgtagagatctatcttggaggggcaggcatagtatatcagcagccatttggctatcttactacctgtaggacagaatggtgtccagtctgagtttagcagtttcttttcctgcagctgcagctagtcctacactgttaagcaacacatctctgctttgtacagttcacagcagaccatgctctgtgttgcttcaccggtgtctagttcctaagttacatgattcattggaaagggagcaaagaaaagagaagcacccacaggtgagccaggggcttggctgatgatcagatgctcagacccttattagtaagcaagacttcagggactgggtaggcattgtctctagtactgcgttggtcactccaagggcagaagccatatttttcacctggaccttccttgtccctcaggactcataggcaactgctcagagactttttaagttacatgtggcactctacttattttcagggggaaaaaacttttgaaacagtttgaaggtgtttgttgttttccttttagataagagtttaccatgtagctctggctggcctcaaactcacagagatcctcttgcctcagcctcagaagtgctgggattaaagcatacttgccaggttataggttgaatttttgcttcactgttttagaaatactgttcttgggctgggcatggtgatgcacttaatctcagcactccagaggcagagcctggtgtaactctgtgagtttaaggccagtcagggctaagtacagagactctgtcctgaacaaaacaaaagtattcttctaaataggagaaattattatacaggagttctaaaatgctaagctaattactaaattaatgaaagtaattttgagaaagatttttttttgttgttgttgttgttaaatgttagaactaagttatatagttgtcttaattctctgacttggaaaactggtgtccaggctggggatctaactctcaatggaatgtttgcctaagtgtgtgtgaggctctgggctccatccgcagcacctcacagtcggtgtgaggtggatgagaggcagatagtttgacacattatccacttacttgttacccagctccctgtgactcacagcagagcctcctgcggtgtgcagagccctatcttcatgtaatggcctgttgaaactactgcctacatgtctccctaaaattaatattctatcatttccctgaacaactgtaaatggttattttaaatataactctttttttaaaatttattatatgtaagtacactgtagctgtcttcagacacaccagaagagggcatcagatctctattacaggtggttgtgagtcaccatgtggttgctgggatttgaactttggacctttggaagagcagtcgggtgctcttaccccctgagccatctcaccagcccctaaatataactcttaaaataatgattacttatcgatgtcttagtcattggttgttattaaactttttccttttacactatttaactgaagatcaaacctagggccttgcacatgctaggtaagagctttactaccgagcaacattctccacccttctttcccctgcgctttgtgtgtgggtgagtgctatggcatgcatagatacctcagatggtaacttgtggggtcgagtctctcgttctactgtacagctccagggttaagtgcagctttgcttggtagcaagcactctaacctgctgcgcttacttcttatcaggagacaaaactctcaccaaacttcctcaggctgccctggagctctgtttttattttggggtagctgactcttattactttttctgttttaaatatgtgtgtatgtgtgtgtgtgtgtagtatgtggaggtatattttcatgtttgcaggtacatgtatgcatgtgtgatgtgtgtatgtgtgtgtgcttgattgtggagtctacagactgattcagtcagggtctttctcagttcttcttccactttattctttgagacaggatctcttcatcaaactcagaacttgctagtcagattgcgcagggttcccaccttcaaagccatagctacaggcagactgccttgacacgtttacatatgtgggctctgggtatctgaactccagtgtgcttgcttatatgctagccactggggaatctctctggtcctaggccttgaactgttttcctcccatttatttattttgtgttttgttgatctattcttatttctttactgtgtgtgtgtgcatgtggggtaggaatgtgcaaggtcagaggacagcctccaggaggcagtgtcagtttttccccaccatattaatactgagctgactttcatctttatattaggtatgcatgcatcttttgattcctgctgctcaaagaatgaatttgttctaattcactttttttgttacttagacatgagatcaattttttcttttctttttcttcctcctcctcctcctcctcctcttctttttcttcttcttcttcttcttcttctttttcttcttcttcctcctccttcttcctctttcttcttcttccttctttctttcttcttccccctcttcctcttcctcttcctcctcctcttcctcttcctcctcctcttcctccttctcttcttcctcctctccttcccctccccttcctcttttgagatagggtctcatgatgtaatcttggctgaccaactccctttgtagaccaggcagacctgaactcacagaaatccactgtctctgcctgaggaatgctaggattaaaggcatgtgccagtgcacctggcccttatggagatcaattagatcaattttaaatatgcatatttggctgggcatggtagcaatcctagctcttgagtctgagacagaaggatgtttgaattctagatcagtttggtctacatggcaagttccaggccagtcagagtgagatcctgtctcaaacaaaagccaaaaaaagtggggggtggggtggggatttacaagttgtttttagcccataggctttgtagaagctgagttcattccaaaatatttctcccctcagatttccaggatccacacaacttcaacataaatatagatcagatatgatccagtaggaggaccaaaccccagaacagtgacagtcttgtcactgaaggatgaacggggaggaagaattctttgatgccgtcacaggtgagcaactataagaaatatgacccagagactgcatcttgtgtaggaatctgtgggctatggagtatgggatttggtctggcttagccaaaggccaggagtgtgttagattggacctgacactagttttattagaaagacaatgatggcttctctcatgaggtgaaccttgactggatcttaagagacagcatgaaaggacagtgtgtgtgtatgggggcggggggttggggggagggctggattcgtggaagagcctggctctaaggcatgtaccaccacttcctggctagtactttgattattctagagtatctgggcatggagtgtcagccattcactgctcagccctgagtgctggctagtcatatagtggacttaccgaaatctcagaagaagacactgagctccttggcttttccaaggctcagtgaaataattttcattatttcatgaccaagacacattgattctgtttcacgttggtgtgtgcctacaagtggagtgtgctggagaacagcctcagtagccctacagacagacccaggagaccatgcctaccacgagcgaccactgcagatgcctcctcacccacacatcccctagacgttccctctcatccagggactcggtgtagcagatactactccaaacacccctgagcttttgaatacgtttctcttgatattccccaaagatggcttcagccttattgatgttgaggtgatttctgccatcctagcagacaacagtgctcccacacagcccctctgtgtcctgacactgaggtggaccatcctttcaccgagtaggcaacagagatgattattctgagtgtaccacttgaaaatagtctcatggggatggtggcacgtgatcccagcactcaggaggcagagatgtgagttcaaggtcagactggtcttacataaagagttccagaccaggcaaggctacatagtaaggtcctgcctcaaaaaacaaaaccaaacaaaaggtttatagatttttaggcttctgtttgtgtagttagtcttgaagtaggcttcttcatctcccaggtctagagaaggtgactgttttttgcttctttgttacaggctttgattctgataattcttctataggggaattttcagaggcaaataaaattagtgggatgattgacttggataccagcaaaagtactaggagtgggaaaaatggggagaaaccacaacaagagaatggaattcaaaagcacaggtacgctgtcttacatacgttgtatcaaggatcaccccatatgtcctatacagtatcccttaggtctcaggagctgaagcacccctagttccaaggtaactctttcaggtcatctagccaccagatgtcctatgagacttgatgcctgtctactggagcatggagatcggtgaagggcagtgtttgacccatgaatccctttccatgaagtgatagtgctgttccaggatggttcacagcctgtacataacatgatccacagccctcatttactaaattgtagacccacctgccactccacaggcaccaggttaatcctgttgttccttcgtgtattgctgagatatgtttgactgctgggctagcaggactagtgacagttctcttgtgccttctacatctcactgagaaatgttgaccgctggccctgtagggactgtcagagtttggctgcggcaaaaccatgtacgtttgtgtatctagactacgtggtcatcacagaagcttctcgatctcgggaaaagcgcccatgggacataggcttcctgcttttattcaaaaaggtgttcttggcctcagtggaccctcagactctctgctgacctaatgcatggcccacttgtcttcaaggcaggctccctctgtctaaggtgcttaaccgtctattgccctacatccacgtgcttagtgggtgcaggagtacctcacatgggctgtgagggcccgtgtaaggaaattgttcactctgtacctcaccagcttcctccaagtgtacgtcaccttgtgaccaaacatcagctgcgagtgtgggatctctccctcattctgttcccctcatctgatgctttggctgctaaatacacctggatcttgaggctctctcgtgtcgaccctgcgtcacgtgtgctgccttccctcattcttcttcctaagcacagtgacacttaatacactgtttgtgtcacccttgttctctgcctgaagctcctgtagcagggactcattcctgtcctctcacccctgtcccaagcagctctgagtagtgctccatttgtcacttctgaagtgagggctcacatttccttacccctgtactcaggcctgtcttcattcactctactggctctgcctcccctggagcctcttgtcttgagttctgcatctagacctgtgtataccgaagttcctccatactgctgtctcagcctggagccttgccatcctcctgcatgtcttttctcttgttgattcttcccatcttcagttgggtattagttagttcctactgctgtgataaacatcacagccaagaccaaacatattcatgtgcttgggtataaaagggtttctttcgcttgcaggttacagtccatcatcaaagaagccatggcaggaactgaagtcgagaccatggaggagtgctttttaactgttttgctcccttgacttgttcagtttgcttcttttttttttttttcctgagctgaggcccacacccagctaggcaagcactctaccactgagctaaatccccaacccctcagtttgctttcttacgtaacccaggaccatttgcaaaggagtgctgctgccttctgcttcacagtgagcttggcccttccacgtccattattcaagaaaatgccttgtagacttgcctagtagcaatcagatagaggtgttttttctctactgaggtccctcttcccagataatcctagattttgtcaagttgacaaaaactagcacagggtggatccttggggcctgaccctgaccctttatggagctatatctccatttctgtggctctcacagtttgccatgtccacagcattccagctacttttggcagccctggtacacagtgctcagtaaacattagatttctttccttttccattttgtttcagagcttttctcctccttgtcttgactcagtgagccttttttgaggtcttacttgacaagaccccagctattactcccaggatcacaatgcccaatcagggctctccggttctacttcagagaattgtccttgggaattccacaagaaaaactaggctgtcctctaagggcccagagcagtcatgtgtatcttagggacattctgtgatgccttctctacactcctatgatgggccacattccttcctacaagctaggcagatctctactgaggcctcttcccacacacggagacagtgcttactgtagcttacagttcctatggaagctctagcctttccccaggtagccagagcaggacttgtggctaaggtgactgctgggccctcgtttagtggaagtggcctgagaaggcgtgcacctggggaagctcttgacacatctcactcctgtagtctcagctctgcccaccatctcaggctgggcagaatactctaaagtaagaagtaaggatgtaagcaaaggggtttctgtctcatcgtcagccttgcccagagctcagggaaggacagcagtgacctggccgcggcagggtcggtccagactccaaggccaccacaaccaataaccattcctaggaggacttaaagcagtggtgcagaaaccctgtagtgtcagctgtgacttcacttctctcccatcaggccattgcttagagactgatgtttcagtctcaagctaggatgacgacattgagtagtcctgtgagaaatatgtcctaccccctacatattccattggataataaattcctgttgctctcaaattcctctcaggacagcccttcctgctcccatgttcaccagaagcgacttcagtgtgtggagtatcctgaagaaatgcattggcttggtgagtgcagataagtcatgtgacacatggagtttaggtattacttccctgagacttatagtgttggtatctaagaaaatatatgctatatatttataatgatcatgaaattgtgataacaaggcaggaaaggaacacatgcctgaggggaagggaaacattatttaggaacagcagaatgcagcagttttacagttaagcaattaagcaggcaggaggcatcccataaagcctttttcctggtgctccaagatggcttaaacaccttctgcatgagaccaggtggggccctcgacatactctaggctataaatagcttttgtccaatactgcggctttgtgtcagggaaatggagtgtctagtagccattaactttctatatgatctttgactattagagaggctagtgtacttgtacagtctctagcacatctcatgcacaaaccagcacttggcaacaagaaactcgatcccaagagtccagatatttctgttgccaaatttcaggtgtttctgcctgtgttcttttaatgccatcttcctgttgtgattacttctatactgtattcccagagaaaacactttcttcagccttttattttaaatcactgtagacagattggaagtagatagattggtgtggagttggcattggaaagctggaagaagttataattagaggttctcttttgggtaggattacagaaaaactaggagctcattcagaattgcatagtgtccatatgccttcctggggacgttaccttaattgcttgattgtgtatccttgttgcagagttttctgattttctcatgactgattgtacatgggtctgggagaatcctgtaggttcatcagtttcattttttatgtttacaggttccttttatgattttatttcaaaatatgagtccaaagtcaaattcattaaatatgttagtctgttttctgttgcctgtactacaagaccatagactggctaaactttaaagggaagagacttattctatttcctgtgtctggagttacaagaccaagggcatgtgtctggtgatgacttcggtgctggcagagtcctgaggtagcataagacatacagggagagttagggaagggcttgcacagctgcgtgtctgtgggtctctctctctttttcttttgttgttgtttgtttacagttctagggattgagtccaaagcctcagaagcattccaccactgagctgtttagccagcccttgccctgttgtattattactatttacatttatttctgttcacacatgtgcatgtggaggtcagaggataggttgcaggaatcagttctcttgtacagcatacctgctgaatatctcaccagcccctgccctgcctgccctatgttagcatactaccctagtcaaccgtggaggctcactccacccagtgattttacctaattctaatggctttccagaagattggcattaacaccatagatggattaagtgtcatcctcttaattcttcacagttaattgggatactctgaccacattcagaacatgacagtctcggaagcccagcttcttgtgcttatccctctccacaagtaactgtcacccattgtcttagggtttctattcctgcacaaacatcatgaccaagaagcaagttggggaggaaagggtttattcagcttacacttccatactgctgttcatcaccaaaggaagttaggactggaactcaagcaggtcagaaagcaggagctaatgcagaagccatggagggatgttctttactggcttgcttcccctggcttgctcagcttgctgtcttatagaaccaaaactaccagcccagagatggcaccacccacaaggggacctcccctcttgatcaccaattgtgaaaatgccttacagctggatctcggaggcagttccccaactgaatctcctttctctgtgataactccagcctgtgtcaagttgacacaaaactagccaggacacccacccatcctgccccacaccctgacatatatacatttcctcccatgcttttagagaggcagtggctttttttttatccctccgacgccagtgtctaatgatcttttaactacttcaattccctttcttagttgtttttcagtttagtgggatgatgtgctgttttagatattagactatttctgaccaaagcagatcacagtgactagccctatatgtatatttgctgaggctcagagctgggtgccgagacatggcattgctggatcaaaggagaaatgtgttggcattttgctagccgtagccacgtcctctttgtaggctatggtactataccaagcagcagagatggagcctggcctatggaacccaaggctgggagtttagagcaggtgagcagtgtgcgcccagctagcctctctcttgctgggtgtcttctgtgtttctgctgcctgctgctgacctctctgacctcttgcactataggttgtaggctcaacttcccttgcttgtacaggtatatgaagccttgtcttttcttacctttctgctatggaggcatccctatattcccagatgtctgaatgtctctcagctgggtatgtagtgtctgagaagcctgactgactctggctcaggatctgtgagttcaggctttcagtgaacaaggccctatcctttcccagaatgttgtctcccaggacctggttgtcttgctggtaacagctgagtattctacctccctcagggcactctatcaatcactagtgacatttgggactggtgagagcagaggaggtcattttagcccctcgtacagaaagcctgcataaaatgaaatgaaaataatcatcatcctaagagccaaagcttgtagtttgttcttgtccctggagcacctgagcctaccctgttataacagcttcactttcttctgatagtccttctatcttctctgtaaatgcctttctggaagctcagctcaggaatagctcctgaagactttcgacctctatgcatgaactctggaggcaggagctacagcctcacttctgtccctttacagactctgaaatagcttccaggcaaagccatattagaagggcttgcctgccaagtaccagccaggtgcttccatgttgtcctagcagaggccatggatgctaaggataagtttgttttgttttgttttgttttttttccagacagggtttctctatgtagccctggctgtcctggaactcactctgtagaccaagctggcctttaattcagagatcctcctgcctctgcctccgagtgctgggattaaaggcgtgcgttattactgtctgcctgtcaagggcaagttttaacaaagggaaacttggggctgataccactcatctagaataggtgaagggaggggaggtggctgtcttggagttcctgtgatcactatgttattcaaattgggagtggctctcagggcctgggagatagagagctgccatgactgccactcaggaaacattccaagttgggtaaggtaaaaaccaagctcaccacagatagcttgcccatagagagtttctaagaccttatctgtatgggaatttgaggctctgggaagtgatccttagaacactagagtaaagtggtttattcttctaggaactctccaagatcacaatgccaattgccttcaatgagccactgagcttcctgcagcggatcacagagtacatggagcatgtgtacctcattcacaaagcctcaagtcagtcccagccgctggagagaatgcaggtgaggacccgttacaggggcccgagtatgctgcttggagggctatctagaagatgccctgtgggaagcagctttgctgtcttgactgaagcagttctgacccacccttgaattgtttgcagtctgtcgctgcctttgcggtctcagctgtggcttcccagtgggagagaactggcaaaccctttaacccactcttgggagagacatatgagttgatcaggtaaggagagttgataatgtatcttgcagaagggtgaacaagaagagctcagctttctcttcagcattgattcctcaaattaggatagatgcttcttggagttaggagctactgaagtatttggaatgttgtgggtaagaaggtattcacacacatagaatgctgggtttctgatgggatagaaccctggtactacgtgaaggtctggcatacgatcttggcacagtgggctcaaggatagaggccatgctgtgtagactactggtgatgtatatgtattacatggtggagacaagggggtcactagtgttaggccaaaagtggagtcagaactaatgagtaggactgtgctagttgtagaagcactttgatgagagttcaataaccaaagagaggagagactacccaagtcactgttcattccgtgtctgtttcgcagggtcttaggacagagctagcctcacctcaggactagtctgtgagtgtttgctgaaatccctctgagtggtttcctctgggtggtgtcatgcctcttggaaccctgtagagcatgaggttggcagtgtgtggtggctggggcagacagtagccagtgctcatgcacatgagcagtgtgtaccctccattctcatccttggacccagcagacctctgaccctggatgctgagtcctagttcatacggtttgtggtgagcctttggctgggctgggagattgttgctacctactttgccaattttgagtcttggagatgctgccatggtaaacactcctagtcacatgtcaccgactctggtatgattttgccttagtcttgcctgtgcctccagagactagtcactgaatttgcacagttcctagtgggctgatttgtgctcttgagggttattcttagtgaccttttctgtgctgcatgtatggctggtatagtgtgctcatgtctcaggaatgcagagaacatcaggatagtttagtaaggagatcttctctgatggggaaggaagtaactagaaggaattagatgaggtcttcttgttggctggcatcatgattatttgccacaggctgtggagctgcaggagggagggccagcacctgccatcctgctctgagatcctttctgtagagaggagttctgccgtgacattctgccactggcctggaatcagcgtcagctggtaatctgtggaattcattaaatggagcttgttggtgttttagccatgataatgatctgtacagaacatggcaaggctggaagtaaaaatcagatacagcccatcaaagaaaattgatatcagcatcttagtagattttcttctgtgtgaggtgttaattgatgactttttcattgtatcataaacattttccttagctaggaatggtggcacatgcctttaatattagcactcaagaggcagaggcaggctgatctctctcagctcaagagcaagttctgtagttcaaaagctacagagcgagttccaggacagccaggcttacacagagaaaccctagcttggaaagtaaaaaataagttataatcttatgtgtgtgaatgttttggctacatgcatgtctatgcacactctcttgagaggctacaagatggtgtcagattcccttaaactggagttagtgatggttgtgacctgccatgtgagtgcgggaaattagacctgggtcttctgtagaagtagccactgagcttatcaaatctccagcctccaaatgtcacttttaaggatgtggctttgtctgaggcagtgaagtgtttccttcatttgtctagactcttctgagcaggaattgccattgctggccacctgtgagcccatcacatacaagatgtgaggtccaaaccttgtttagcttaaaatgtcttgaaaaggataagataggagccaagcagtggtggtgcagcctttaatcctaagtcttggaaggcaggggacaggcaggtaaatctgagtttgaggccagcctggtctgcagagtgagttctaggacagccagggctacacagagaaatcctatctcaaaaaccaaaaataaaaagaaggggaaaaaagtggaggagaaagaggaggaggagagaaataagatagaaggagaacatttctgggtgatggcggctcatacctctacattctagctctagccagcttaggtagaaggattacaagctccaggctggcttgggttacatagtatggacctgtctcaacataaagaaagcagcagcagctgtgtggatgtggagagaataggaatagcccgaggtgcggatatcagacagaagcttagcctgacttgggatttaattcataggctgaaccgacgtttccgaggctgccaggaaaactccctcacaatatgttcctctccaggcctgcttgttggtgtctccacagagattccctgacactaagtggccctactccacagttctgcacagaccaggctgtgtacaccgtctttcatcccttcatatccctcttgaacagctaaaaatacacttgcttttcttagacaagtattcattttgtagattacataccttggcaggcaaccttttaaaatctaatttttcaactttccttcctctgtaatgattgggaattctgattccagctaagttagtaattatgtggtttagcttttataattcctaatgactacaactgtaggtgtattcatagttccggaacaattaaaaactgacatttttattgaataagggagtctgctaaaatcctatttcctggccaggaatattctgggatctaagacgtttcatcatagaagtcttgggagcctgtacaaaaggctggacaggagcacccataggcttttgagtccgttgggcttactggcatttaggagtccctgggattgagattagtctgcatctgaggcctgcctggctgatggctaaaaggttgaggtaccaatgggatgagcagtgggacagacagaggctccctttcaggagagcttgtgtggtagtgggcaggtgtactccagagtgacggtacacagccagatgagccatctaagaggtggttgctgagtgtttctgcttcctgtcagaactggaggcttctgggcccaaatcctatatcagtatctaagggagggcagaccatgccagctggtgggtaagtggatgaccctttgctatggctaccattaatgtgactttttctcttcccccttttctcatttttggatctagggaagacttagggttcagatttatatctgagcaggtcagtcaccaccctcctattagcgcattttattcagaaggtctcaatcaagacttcaggttccacggttccatctacccaaagctgaagttctggggcaagagtgtggaggcggagccccgggggaccatcacactggagctgctcaagtgagtgacaggtgcaggcgagggccagcatgccctgcactgactgtgaggacgttatggcttccacttctcagagggcttccttctggggagatcccgaccttgtgtgggctgagagcctttctgccagcggcacttctgctaggcttcctggtggggagagttcctgtgtccactgaggtggatgagtcacatctcctcccacgcactgatcggagccgctcaccttaaccatcagttactgctttatgacaaccccagacccaacagcttagcttagcactttatttctaggccatgcctaagataggctagctccaggtcagcaagaacttcactcttggccatagactccctctccggggctgttcagagttggatactctgcttccttaggccacatatacctgcttgctgatgctcactcaggcatgtgtgtttgtacatacaaagctgagtgcctgcaggtgaggaccactagcggtccctcttagaggctgtccagcccagctgccgtcggagaaactgtcagtagcaagtcttcagcatatgctagagcttgaagcccagtgcaccctgcagagcccagggcttcagttgttgctgtggttcttcagtatgagcctgttgtgagggagtctctgtagatttttatctctactggccagttgccagaccattttaggagcctagggacaggctgggtgtagttgaacacatcttcaagtccagcactcagggagaccaaggcaggtagatctctcttgagtttgaggccaagcctggtctacatagtaagctctaggttaatcaaactagatagtgagaccctgtctcaagaacccgacaaacactaagaccctaggggctgtccctgcacagcttgccagggacacaaagcgggctcatgagggaagctcctgtggtagacaccccagtgcttgacctgtgtcctgatagtctctgctttgggagttgagatgggcagaattggaaagctgcaaatgtgttcaagaagcatgtttgggttcttcttgggccgcttgagagagggctaaggtatttttccttagccatcctctgtcagatgtttctgctcttattcaggtttctctgaggcagcctcctataggcgcaggtctaggtctgctgcgtttaccctgggaggttttccttgaggcaaggtcatttcaaaggatgggtagtgttgcttatgttgtcagcagcagcgctctcctgcacttcccacagctaggctggggctcaggactgattttctagagcacctttcctcttggccgcttcccaggagagctgcctctcttttgttttagtcttcttttattgcttattaacttgtcttggcatttaggtagaaagctttgttgatgctacaaaggaaaggagaaataaatttcagatgcacactaaatcgcctgcactggaaagacttcaaagcactgtcttgctcccaggcatttatggtttggttttgcctggtcgtggccttctgggtcacccacgttctgagcttcatttccctgacttttttgttggtgtgttttcacagacataatgaagcctatacctggaccaaccctacctgctgtgtacacaatgtcatccttgggcagctatggatagagcagtatgggatagtggagattgtaaatcacaggtaacaggcccatctgtgtatgcgggatggtgattctgagccatagatgacaggccaggctgtctatgggaagacaggccaggtgagctgacagatgtgaagagagctgtctgtctgcactcctcctgtctagacttccagccctgcattcctgtccctcagcttgagtccttcctgtagtggggcccctaggcattgtgtctgactagatttagttctgtctagtgtggagacaatcagaaatgctccatgttgattgattgtctttttcattaccattgttaatttctctgcaaatgtaaagtgcaccaaagaagtgtcagtgctaggtggaaacatggtgatcacgcttatgtgtgagtgtcagtgctaggtggaaacatggtggccatgccggaacattagggcctaggctacagctgaagctcatgacttgctggctttgctgtagacaccttagtaataatataatttataaatcaaaaaaattcaaccattatctagatggacactgaagtgatattttagtgaattacccagttgtgcaaacagtcaccacaggtcagttgcagagccttcctgtcactgagcaaagcccccttgtgctgctctccatcactcatggacccctttcctaggtgaccaagtccttctctttcccctgttgggaagcctgattggttctctagacatttcacattataactaatgctgtgtttgtttccacagaactggagataagtgtatacttcacttcaagccttgtggattgtttgggaaggaacttcacagagtagaagggtacattcaagacaaaaagtaggtctactcattgatgcccgctggctgtgtgtctacagtgtccggtgctgtacctccatgtgcttagacagtggtgtctgttcggggtgaaaaggatgagtattgagtgtgacctcaggtgataggagagtagagtttgttccctctggaggaagaagagaagtgaccttaaaaaatagacatttttaatcccagcactcgggaggcagaggcagacggatttctgcgtttgaggccagcctggcctacaaagttccaggacagccagggctatacagagaaaccctgtcttgaaaaaccaaaaaaaaaaaaaaaaaaaagacatttttactcagggataatgtggcttttttcttttccatttattttgtttctgagctggccttgctatgcagtgcaggctggcatcaatctcacagtcctgcatccacctcctaaatgctgggttatagcctggatcacctgcccagctctagtgctacaatcttacaaacagaactgagatgttagcattcacccaggagtcgcctccctatgggtaccaactttgcatatcagtaaagaatgtggacatccaatgttcatgggtctgcattattccactctaagccagggctttacggagatttttgtgtagaaaatggccagtagtgtattttctggatttttctcccattagtaaaattatattctggatctcaaatttttatttataactaaccatggttcagtagtataaggccaagagagtctttcaagctattgacatctagttttaacttcaaaacaatacttttgttctctctgcttatctctaggaaactagaaactcatctatttaaacaatctgtatattaatgtcagactttaggttgatgagaaatgtcaggacatcacatgtattctgtaaaggacacaggtcctaatgtggtcagaatggtgaccaaggcatctttggagcctgcctgcccgtggttgaagtagctgatggtttccagctgatggacgaggcttcactttgggttctgtaccctgaatccaagcacactttgctttttccttttcttcttgttttgtttgtgtgtgtgatgtataagtgtgtacatgtttgtgtgtgtgtgttgtgaacatgtttatgaacattcgtgtggaagctgaggtcagtgttggctgtctttgtctatcatttgtcttttgtttgctctttgaacctagagatcactgatttggcctggctgcttggctggctggctggctggctggctggctgcttggctggctgcttggctggctggctggctctggctctgtctttgccccccagtacgggtattgctctggggatctgaatttggggcctggagcttctgcaagaagctctcactgaatcttctctccagccccaagccaactttttccatggaggtaaagagttacttaaggatctgggctgagctcctgagttcctgtaaccaactctacaagtgcctgccatatctacgtgtcctgagtagcactgtcctgtcagggcacttcccaagaagcatgtagccagtttgtgctcttcccagacagagagaggcaaaaggagaaaggctgtcctgcatggactctgttcaccttaatatgaggcagagtctaactgctgtggagttttccaggaatgtgattagatgaagagagcattgataaccaaagagcaagcaagtcatcatgtgaccttgggaggcattatggagagatttgatagaaaaaggtctataagcctcagggtacatgaaaacctagtgcagtgcttaaaagcaacaggctgtgggggaggctcagtggcaaaggccggacgctggcccaggctctgcacagatactagcagcacatttcatttcattatgtttgtgcttttgcccctgttttctaaggccccagggactcccaggcttctgtgccttcactttccgtctggcaccggggatgggcataccttttctccagcagcgagaatgagggtctgaaacacagagttccttcctgcactcagtactgctctgcaggtgattgttggtaactgtgttttaaactcctttctgcagcaggaagaagctctttatcatgtatggcaagtggacagagtgcttgtggggaatagatcctgcttcatacgagtcctttaagaagcaagagaagagaggtgaccaggccaggaaggccaagatggtgagtgtcagctgcagtgaccctgcacaaggtggccacgccctccaggagcactgtgcttctcttcaggaggtgtatgtagtgggtgggctatgtctgtccagaccagactgtcttctgtctaggttctgctatctgggcagaggtgtttgactttattctgtttatgttgtagctgctgggaacttccagtggaatgcaagcccttccacatagccctttgtaatacagctctcactttgcctgagttagctgaggcttacttaagtcaagaacatctcatttctgtttttccagttcttgagttctcagtaatatattcagcagtcaggaagtactggcaaagactttcctctaagaatttcagaatactgatgactataagttattcttaagcaaaattagaattaaaagtgatagttcaaaagaggtatcttactttctagattaaaaaaaatcaggatgttctaaagcagacatgttaaatgttcagtatttatttaacagaaatgtttggactcatccaggtatctagtttttttatgttttatatgcactattttggacatcttttcataataattttatttagttatttatttagttagttttttggaacagggtttctctgtgtagtcctgactgtcctggaatgcactctgtagaccaggctggccggaaactaagagatctgccactctctgccccaagaatgctgggactaaaggtgtgtgccattgaaagatcctggcagaatgtaaaaggacacagaagccctgaaattggcaagatagacgtcagtgttagcagaactagcttcactgatttagaaaaatagaggtgcacaatgctctggccactccttgaacctgtgtgtctgccaatgttctgaccaggtgtgtgcccattgctgcaccttcattagactctttccttgtatccctcccatacccattttttgagaatagacattgtttagatctggaaatcccctaatctcccccttctcctttcccccctgagggcctataaaaactgggaactctttcccctcgaggtcgactcctctacccctgtgtgggatatgagtcgtccccagagctctggctttccccgaataaagctcggtctgtcgtgagttcttgggtgtccgctattgtcctgaggcctgagcgaggggctcctcttggggtctttcaccatcactgcccagtggtaatttaatttttttaaaaaaggaaaatttcttcaagtacgatagtacacttatgtaaacacgggaggatatctgttagttccagggcagcctaatctatacagcaagttcccagctatccacagtctacatagtgagattccatctagagagagagagagagagacagagagagagagatccatgtagcatgttgagtctgctgagtgctgtctggtgccagtctcactaagctcactgcttcttggatcatctggcaacaagggcccacccttggctttgctgtgggcagttagaagggcccagcctttgatcctgggtccctggagttttcactccacagctgtgtccagtagccgactttaaaggcacatcaaacagctgtgcctgttaaaatgggatgggctcatgagcttgcccaggagaacagatggcaccaggaggcctttcgtctcagatgatgtgttatgggtccagaaggtgggcaggcacatggccaagcatgtgtggaggaggacagtgtttgtatctgctgctgtttcagcctgtgagggtagtccagcctggtacagctctgcagaaagccaagctacatagacagtttgaattttttttctcctctgttagaaaaggctgtggcgctgcacaggggcttgggagcaagtctataagtgctctggggaccagtcttctggccagtagtcatactgaggtatcctgtgtttcaggatgatggccccgagaaagctaacagtgatgtgcctggtgatgtggcagacgacgttcctgtggctcaggagacggtgcaagtcatccccggcagcaagctgctctggaggatcaacagccggccccccaactctgctcaggtctgttacccctctgaggctggccccccaactctgctcaggtctgttacccctctgaggctggccccccaactctgctcaggtctgttacccctctgaggctggccccccaactctgctcaggtctgttaccccctctgaggctggccccccaactctgctcaggtctgtgttaccccctctgaggccggtcccccaactctgctcaggtctgtgttaccccctctgaggccagtcccccaactctgctcaggtctgtgttaccctctctgaggctgggcctgtctgctgcagcctattcctatttgtacctttccagtcaggcccacaactcttctactttgttcttgcatgtagccaaccagctttccacaagcagacaggcaggctccatcacatccctgtaatcctgcatgcccttactccctcgagctaccatgagacttatgttgtggtccagcctgagagtaacttctacctcctgctgcctgtgtgggacctgggaataagtgggtatggcaatccacctagcattcatatcttgatgtagaattcatggcagaattcactagtgcttggttatgccttcagagctctgtcctgaccacattttatcaggattgctccagggactcgagcagcagcttagccttaggcgtgactgttgctgttctcgaggacccaacttcagttctcagcaagcacctgtgtcaagtagttcacagctgcctgtaactccagctcctgggaggccgagcaccactggtctttgagcatacctgcagctacttgcaaattcctgtgcgcgtgtgcgcgtgtgcgcgcgtgcacgcgcacacacacacacacacacacacacacgtgcacataattaaaaaataaaaaaatatccaaggtgtggtggtacatgcctttaatctctggggagtcagaggcaagtggatcctattaaactataagtctgcaaggtgagtttcaggacaaccagagctacataatgagttcctgtttcaaaacaagcaaatagaataaacaaacaaatgaatcagtcagtcagtcaaaccaggcaagggtgcccacgcctttagttctagcactcaggaggcagaggcaagggatctctcagtttgaggacagcctggtctacaaagtgagtttcaggccagccagggctacacagaaaccatgttctcacaaaaggcgggagtggggaacttcagggcatgtgatgtaacttagttgggcagtgggcagtgacatggcttcagtgggtaagggtgcttactacctagcctcacaacttcagtttgatctttggaacacttatggtagaaggaaagaatcaactcttataggttgtcctctggtctacatgcatgtacccacacacgtaatggcacatgtacaaccacacacgtacacagagtaaataagtataaaaagaacaaaggcccgcttacctgtgaatatgttgccttgctgtattggtttgcttttattgctgtgataaaacattgaccaaaactaatgtggggagaagcttacacttctaggttacagcccattactaaggggagcccaggcacacactgaagcagagacagtggaggcgcgctgctttccggctcattcccacagacttgtctaaggccacccagaggaggcattttcttaactgagggtcccttttcccagatgactctagcttgtgttaaagtcaccaaaacgaagcaaaacaaatgaaacccaaccagggttctcgatgtgccactgttacctttcacgacggcgtgaactcatggaacaggattcgtgtagaagaataaagcctgtgtggtgtttggggaaatttctttttggatgaattctcattcctttttggttcagtgtgcatgaaaccctcatgcctatttctttggtggatctggggtattggaaatggcctgagaaagataagagtgcacattcgtgggcaccaccattactgagggtactgggcaagctggttctaggacaagaggctgtgttaatgaagcaggattctaaaaagagtcagatgtgagttatggctacctgaggaccatgtggggaagccagacagattctctaacactttcctctgtggacctcaggtcagggatgatagcaatatctgctgtccttttaatgacgtcagtaccccgggagtcacttaagtgggctgactagagaacatttacattccctgtggcccttgagccacatgctcatagatgacgtaagaaagaaggccaccttgggagtcaggataaaggtctttgctgaataggatgcagacaccctcctgttgagcaggtgacacaagactgtcatgggtttagtgcaccaatgggtcattttcctgcagccatgtgcaatagtgcttctgtgcttctcctgcagatgtacaactttaccagcttcactgtgagtctcaatgagttggagtcaggcatggagaagactctgccacccacagactgccgcctccgtcctgacatacgaggcatggagaacggaaacatgggtgagtgctgtgccctcagaaggctcgtgtgggtaagcttaggcctgctctgtgagaaggatgctcagacctttcatcaagacagactaacagtgtgctgccttccaaagattgcgctttatggaacagcaaaagggaggtgaacagcttatcttccagctagccacagaccagtcctttgtaaaacgttaaccttaaaaattaacgagggggctggtgagatggctcagtggctaagagcacccgactgctcttctgaaggttcgaagttcaaatcccagcaaccacatggtggcttacaaccacccataatgagatctgactccctcttctggagtgtctgaagacagctacagtgtacttacatataataaataaataaataaatctttaaaaaaaaattaacgaaaccgggcgtggtggcacacgcctttaatcctagcactcgggaagcagaggcaggtggatttctgagttccgaggccagcctggtctacaaagtgagtttcaggacagtcagggctacacagagaaaccctgtcttgaaaaaacaaaaacaaacaaacaaaaacaacaacaaaaaaagaaaggcgtgcctgaggatagggagaaaggcctgaacgtctggaggtccactctcacctgatccatgccgggcaggcggtgctcctccctccaaatctaccctctccttcatcagaagccgcagatcatctcgcaaggtgaaggttcagcagatttgggattcttctaccttggggtctgtgagctcactgttccagatacttgctttcccacttgggtttcagtgccattaaactgcccagcacatcacagaacacacttggaggaatgctgtgccctcctgggatgcctcccatctgcttgtcctggagaaatgcccctcgaacatctggcagaaacaagtcacccttaacaggtggccaactgaaaccagagttcactccccacactttctcatcaaagtgggacaaatcctctaggggtcaggatgtgggtctggcatgtctgacaagagagaagtttcaagtgcttgcttacttgcttgtacctagatctggccagccaggagaaggagcggctagaggaaaagcagagagaggccagaaaagagcgtgccaaagaggacgcagagtggcggaccaggtgagctggaacaagaggcctcatacacctgggtatggagaggccacatcacatcttaggcagtaccaactccctcctccctaaatgacctgtgggtccataaagaaccctaccctaccactgctacctagtgctgtgactcaaccatgtaatgaaggccggagtgtctgcttagcacatatgttgcttaaaatcatttactgggagttggctgtcacagaagacgtgtcatctcacccccaggccttgctgttctacttcacagcatttttgacccaaaatagtttttcaaatatggtcagtttaagcctgagtctagctgttcatttaaacagttggtgagagttttgatgttatttccacatttatgcattgtggtagggtgatgcatacatacacacagatcatctccccccgtgcactgtggtgccaggctgaagcccaggtcctgctgccagcccactgtggcaccaggaaaacctctactgtgggtatgaagatgtagccctaaagtgggccctctgctgatatgggggggcatgcagaaggtgtgctatgactcatgggtctataccagctgccaggagctttagccttacttagactctggtttcttacattggttgtctttttcttcagtagtcagaggactataataattaggcataagcacaatatgaacctgtatagtgcatgtaaacatttctagtcttttgtgaaaatctttggatgtttgaaacagttcacttatcaggttggtagttgggtttggtgtgggggggtgttttttcaagacagggtttctctgtgtagccctggctatcctagactcactctgtagacctactggcctcaaactcagaaatccacctgcctctgcctcccaagtgctgggatgaaaggcatgtgggccaccaccagctggctcaggctggttgtttttttgttgctttttatttttaagatgggttacgctgttgtccagtcttgaactcaagcacctcctgatcctaggctccatagtagctgagagagaggatgtgtgtgtcactgcctgctacagtagctgagagaggatgtgtgtgccactgcctgctagactccattccttgtgctctttatttctaggtcatattaacaactgtcttcaatgacattggactgggtttttgttgttttatctttttgtttttggagtttctctgtgtagccatggttggcaactctgtagaccaggctggccacaaactcagagatctggctgcacttgcacacacaactcacccagcctggattaaaggcctgtgtgtcactactgtccagccagtctgggattttgaaacaagtttttctccacccttttgtgctgtgatgaagatgggacccagagccttctgtatgtggcagacacttcaccaatttgtcattgtgccaggctctgagacagttattgatgcatgggcttctgatttaatactgtgcctttgatgtgcatgtctttgttctagagaaaaacttgaaaataatcttcttttattggtcttctaaagtatttaaaaaacataagccagatgtagtggcttgcatctctaattctagcattctggaagctgagacaagagaatctgaatttgagaccagcagggtttcaggcaagtctgaactataaaatgagacactgtctcaagaaataaataattacaaatagataatccatgctgggtagtagtggcacatgaatttaatgctagcattcaggaggcagaggcagagacaggcagatttcggagtttgaggccagcctggtctacagagtgagttccaggacagccagggctacacagagaaaccctgtctcagaaaaacaaacaaacaaaaacaaaaaacagatgatccattgtgaaaatgactttttttttcataaaagattattactgctacttttttctttgtggtgctggggatgaagctcaggacttgtacctgacaggcaaactgtttggtataaagccagcctatcacttttttgggagacccacagaatggacccctgatgaccatagttgctcctgtttggtggagggcagctgcaggagtgcagcctgaacctggtgaggtacaaacttcatgggcagcctctctctcctctgttgttgtccatcctgtggaggaccaggtgttggacttggggtttgttgggagatagtgatgttaagtgtgtgagtgagcacggccacaggaaagctagccggccagttactgtcagggatggggttcctcgggctgcatctctccagtgctcacactgccagtgggaaggctgactggatggatcctgccgtctgttaaccacctcccttgcattgcaggtggttctctccaggcaataacccctacacaggagctcctgactggctgtacgccggccattactttgagcgtaacttctcagactgcccagacatatactaaggcctgtgagcccaggagcagccttggaatcctcaaatagcatctgagctttatggtggcagacaccacaaatcatggagatagcctcggacgtgacagaggccctcagagagcctcagattgcccagtgcgtcactatgttgcagccccttcatgaagctccagttgggtctttctagtcactgaggcctcagaactccacagtcctttcctagatgacagagtgtaaaaggccagcagagctggcagcacactctgttataaaatgtataatgaaggaagacccagcagggcctgtgtgttccactcaaggctgtggcgtgggttctggaagactttcaaactcagacccaaggaggaggggagcatggatcctggaagtgtcctgtggccagggtccccttctttgtggaatgaagtgacaagcctccagattctgtattttctaccaatcttgaataaggtaaagatgactttagaaaatatttaaattgaaactacttgaattatctgctaaagtgcagcaaacacataatcaccactgtgtaccgtccaaacaaagtgtccccgtgccaagccagagtggcaggaacactgtgacttagatgaggaacccccagggccgctccagcctcgaaggccctgcctcatccacagcgctccatagcttcactgtcactgtggaccacacctgtctctaaggtcatttcttcactcacctcgcctgtgtgccctccctgctcccccaaagtcttgtgttcggttccccagtgtgcatgtttcagtccaggcaagttacattcggttgtgtgcaatagaaggtcagaagcaagatcttacctggtgtcattaaaattgttttaacacaagtaggtgtgtccacctctgcattcctgtcacatgatggactttatgtaaaaatggtgacaccaaggctcacagtggagctctttgcatcaaagataatctactgtgtacacacctgtgcattcatagtgtgagtcacaccaggcatttgtaaatgagaaggtatgatcactatgtccaggcttccaaactgcctctgtcattaaaacactttgaaaatccaacatgggttgaaggtttgatttaatagctgtggaaactaaaaacaggtgtttctgtggcagccaggagacctcccaggactagcgtctctgctctatctactgaggcctctaacaaaccttctgatggctctgagatacgtctgaaggttatggctttgacatctttccaagaggaagttgtgaagtgtctgagacaacagggtaactgtgtttgtctgagggggacatttgctgttccagaccatggcagtgttcacacagctcattaccccaagttgaagactacaagtctaaggcacacttaaaatgactatttcagaagccttcagacctcttcaccagtgattctgactgcctgaaataacaagccagtggatttgtatctctgtgtcatctcctaaggcaaggctctgggtgttttggggtccatcaccatgtacacagcctccacacgcagtttctgtgcacatttgcctaaaccagaagtataagggggaagggcaaagggcagctgtgtgcaagtgacttaacagtgaagagttactcactacaatctctgtctgcaccaacacgtgaagaagttgccactctgactcctcacattggactgttctagaaagcttccataatgagctttcccatggaagatatgcactgaaagacagcctcctatgtatgttgcatgtgagcacagccttgcatggggccttggtgcttacagagtagtcctgtctcttgagataccctcttgggaggaaaagaacaacaggcttttccaagtataatattctgaagtcaggtacagtgatgcatgcctataatcccagcatttgagttgtaggagagaggatgaccagtttaaagtcatccttagctacaaagcgaactgactagcctagggtgtatgagcccatgtctcaaaaacaaaaaggaacttagagcctcagtagtgagatgaatctcattcagctccccttggttttgtgtttattctaattgaagttagaattgagtcaagtttctgcaagtccaaggaacattactctgatctattagagacttaaaggtgagaagataaacatctgtagggttttatgtaaaatgtatctttttaaatgatttaagtttctggtctttctcattgctctgatggttctctgaagctgggtcaagagcattcacatcctcctgccaggacttagctagaggtaggcctggccctgatgtgcatcatgaacctgcctctccaaaatccagtccttcagtcctgcagagtaaacacgggaaatcctttggctgcgaacctgcaatgctctgggagcacagtgctctaaggaagaatggcgacaccacgtatgtgtgtgtcagtgcgtccagtctgagctccagcaggacagcgcccactggcattcacagctttcagactgcccagagcttacaatgatcattgtctgtcaaagggtcagtgtcacacttccaagtctggtacaggcttagctcctaggaggctgccacacctggagagccatactcatccatagaggatatgtcctatatttcctatgtcctcgtagctgaagcctagaagatcaaaagaaaggcttaggagcctcctctgtccctgttagtgaaccagccttgtaggcagcctctaaaggaaggttcctgccagactccgcttctatggaaagttctctctctaaaagggagttacaagttttatgccttcttaccatctcaatagactaaatgtgaagacacctctcaaagcagtgggtacctggcatcctaggtccttggagtgtgaggcagattaaattctaagctcacataatggggactgtcctgcctcaagttcttggacctggaggagttgcatagaaagtcctcagagccaaggtttcctcatgtctcagccacagacttcctttttcttttctttttttttttcgtttttcttttttttttcttttaaagatttatttgtttattgtatgctttaagtacactgtagctgtcttcagacactccagaagaggatgccagatctcattatagatggttgtgagccaccatgtagttgttgggatttgaactcaggacctttggaagagcagtcagtgctcttaaccgctgagccatctctccagcccccttgttttggtttttcgagacagtgtttctctgtgtactcctggctgtcctggaactcactttgtagaccaggctggccttgaactcagaaatccgcctgcctctgcctcccgagtgctgggattaaaggcatgtgccaccacgcctggcttagccatagacttccttatgtctaatataattaaagcaccaaacatggggacctgcagcctgttaaagcagctgaccttgccaggcagtggtggcacacacttgagaggcagaggtaggtggatctctgcctggtctacagtgtgagttccagccaaggtgtcagagaaactccttctctaaacaaacaaaacccccaaatccacaacagcaaaactggctgaccttaggagaactgatatcttctgggtcctcactagcctccatgtgcttggataagattttcctggtggtgtgctctatggaagtcatccccttctagactgctctctctcagagatagctgctctcgtcagaggtcggggaaagcacgtctacagagaacaatgacatttccagccattctggcctggtccttgacctcaggctgtcttaagactgcaatccttctcatgcctatgtgtggctggccctttaccaacacccacacatggaaatgtcaggcacgaaaatgcactagggacatgtctatttttgtggctgtcaataccatttatttagcagaatcaatcatttctgggttttggttttgaggactgtgcacatatctatgagtatataaatgttaactttcaggcctcagtagagattctttggaaatggcttgtggttgacatttattttacattggataatttatcatcatctcagggctctgacttttctggaaagagctacaggcaagttctcatatcctactggagtagatgtttggactaggtattctatagagttggcctagaaaatgagttatttcttaaaatggcttgccttagtggggaggggactcaggtggtgtgtcaggatggaggagtgtttaggccttttgagttgtcatggctctacttaccctctctccttggggactagagaagccataaaacagctgggctggggcagcttgattgcctgggagggagcccacaagtttatccagtgtcatgactctgtggatagagggacagatggtcttccagaatacatgtgcttgcaatgctccagctgtgcagggcagatggcaccattggcacaggtcctcagtgcagcgtctgactgttaggacactgttagcacacatcttacctccattctgaccccaagcagcaagcaccagaaggtggagctgcccaggctcacacctgccagggcctcttcttgaatggtgtcacctatgtgttccagcaagttcatactctcgcatggccacttgctgccaaagcccactgcagaagccatgtaggtgccctattaaacaggcttccccagccctgaccacccccacctgacagattctgtccccaattcctttctgtctggctgttttcatttttactagtttatccaacagtggctgtgggagcctgagtgcgggtgagcctgggctagttcttttctctgttcgttcctttgcttttctgtaagcactgagatgtctgtcaccttttgtccattcaccagactgattcaaatttgtggcatttgtaaagaaccctggatagttgtacacaggtttcctgtggatacctctttcgctctacttactttgtgtacagagagcagacttcagccttgggtgtcattctcatgagcatccatctgttttctgaaagtctctctgggacctgaagcacatgattaggctggactggctgacgatcagtgaactgcaggaattccctccccggtactagctctgcaagcattttaacaagtaagctatcttcccagaccctcttggttttctttgaggtcacatctcatgtagcttgaaactactaccctcagcctcctcagtgctgggatatcacatgtgagtcaatacacctcgcctgtatatcagcttgcatctctcttaggtaaatgcctaagaaatactagctgagtcacatggttatagtatgcttactgtctgtaaaaacaaacacaaacattgccacctcaccaaagaggaaccatagtggcaggtgaagctagggagtgctcaggttgtagagcattagaaacctgccgacacatggtgagggttggcacagcagggcactcagcaccactggggcatgcagaggcaggcttcagggacttagaaaactaaatgcacctcttccttattctagaattcaaggccagcctgctgagttccaggacagccagggctacacagaccctgactattgaaagaaggaaaactaaccataccatgcccatggtgatacacatgtagccccagcttggaggggaagacaaagtcttgggttcaaggctagccctaattacatattgagaccttgtttccaaaaacaaaacccaaccaaatacagtcctaccacaaagctgacaaacaggctttcatatttaccaacacagacctacacacaggtacttgtaagaaaccaagaacaacttcagtaagtgaacagagatgcatccagatcatggaatatcagtgttggaaaggagattccaagccataaaagggcctggctcagcaggtaaggccccctagcgtaatgacccgagttttatatccagtatttacatggcagaagaagagacctagctcctgaacttacagacattttgctctgacttccacaagcaagcctcggcacaattccaccattaaagggtgggaagctagagtgatagacaatgatttggttcccagcacctgacaaaaaccggtaacttttttttttaaagcttcattattatatgtaagtacactgtagctattttcacacacaccagaaaagggtatcagatctcattatgatggttgtgagccaccatgtggttgctgggatttgaactcaagaccttcaaaagagcaatcagtgctcttaactgctgagccatctctccagactgaactgataactcttaattccagggaatctgacaccctctgttgtttgctgcagactcgcacatggtacacctacatactaaaaaaaaaaagaaaaactttttttttaagtcagaaaaaaaagacatgggggaacttaattgtcattgagagacgttcctttacataggccacggtgcactagtacaacatgatattttgggaaaaaatgtgcaagaagggcttggggtgcaggtgagctgtgagctgtggcactgttatgggagtgtttgtcaatatgaatagggaacatgccaggccccgtagtctaagtgtggtgtactgtatacttactacccagtggctttcagggggcttctgaatatttggaggccattctggggtatgtagtgagactgtctcaaacaatatatgtgaacagtgttggtttggtttaactgtctccagggacaactcaaaactttgtgataacattgtgaggcaggactgtcaggtgaggaggccttgagggtgcctccctcatgcataggactaagcccttatgaaggcaggtgtcctaccacatagccctactagacaccgaaactgccctgctttgaccttggtcttctgctggaaactgatttgtgttcatttagaggaacagagtagcacctgcccagtgagccccgtgcatattgtggatgtctaagatcatgaacttgggagaaacattactggttctcatagacccacctggaaggtgcagcctgggaggcaggggcaggggagtgtgagctgtctgtactttctgctcagttctctggtgaacctaaaattattctgaagaattaagtctattaataagacaaatggagagaaagccatacctgccgaagtcagctccccagtggctgacttcccttatggaaactaaagacagaaaccatccacaatgtagtccacacaggtcagggccaaggtaatcactgcagcctacccactgttgggttctactacaggtttggacattccaaggactgtatttgtgaactgcagtaactgtggggaccagcatctttgccttttttgtgccgttatgcagcactcaaatggagtggccacgaacacagccttctcagcacccagctaggatggtgtgcttcccgctacagaatacttaaggaaggcatgggaggtgccataggactgtaagctttcctggctcatgagaagatactggatccaaggccctcaacattcatgacctggcagaagcccaatctcctggctttgaaatgtgggttctttgtgactctagtagcagctttgacatatgtggcaagtaacatttgcttggggccacaaccaggttagattttcttctttttctctttggctgcttcatgctatagtgtcagcttctgacaccaggctccaccactgccttctggaaactaagattctcagaaatgatgagggctgcctagcaccacacagaattgtcacctgcaaagaagttttgtttatgtgggctttaaacagcccgggctgcatcatcccattaaggttctcagcacccacatggtgacttacatgtgtctataacttcagtcttaaggatcccagatagccctcttctggactttgcaggcacccagcatgtacatatgtacactcaggcaaaacacccatacacataagatgaaaaccaattacaaaatcgagctggaaatgtgacttgggggtgaagcacttttttggggggagtttacgagacagggtttctctgtgtagccctggctgtcctagaactcactctgtagatcaggctagcctccaactcaagagatccgcctgcctctgcctccgagtgctggaattaaaggtgtgcaccaccacacccaggtgggggtgaagcaattaaccaggaatgtttcggccctgggttggatagccagcatgacaacaagcaaagataaactttcagtttatgaacataacagtgaagtgacagctctattttccaaactgctcccaaattaattaaatctttaaagaatgacttaaaacattttatgtgtgttttgcctacatgcatgtctatacaatgtgtgtgtgtgcctggtgctcacacaggccagaagagggcatccggtctcatggaactgaggttccagacagttgtgagctgccatatgggtgctggaaatcagacctgggggcctctgcaagagctgccagtgcttttaaccacggaagcatttccccagtcccaattaaatcttttaaattggtcttgaacacttggcagttctcctgcctcagccttttcagggctgggattatcaggcatgagccaccacacctaacgaaattcaaaggtttttgtagtaaagctggaaactgggccagcgagatgactcaacaggtaacattgtttgccaggcaagtctggtaacccaagtctgatcacaggaacccagagtgtaaagaagcaagttactgaatgttgtgcttagactgccacatgggtgacacacacttttaaaaaaaggaaactacacaggacagagtccaacaaaaagatgacagacgcaagcatgtagaacttactgcatcagaattccaagcaggaactaaagcgagtgagccacagtggcgacagaaatgcatcttagaggcgggactccctccagctcaggctggcctggaacacgttggtgtcggcgtcagacagtagtaagtgagaaaaactacttttcacctttgtttcagaaaaagaccgcacacgtttcacatatacacagatggtaacttgtggagcatgccagagaattcagcactgcttggccctggagagggctggagggtgggcctggggccttaaagctgtcatagaggaagcaaagaaatggaagtggtgtgtaaaagaaactgtgaggactcttgggctttacattctgcgagcacctctgccctacaggaaggtggtggcaccctacctgactagctacaagcagcccttagaccccacccatccgcggtgctctgtgaacttgttcttacagcattgagcaaccccatgctaccttctccaccccacctccactcccccatcctgagcagccgcttgtactttcctataatgtatgtcaaattagcacaaagtgacatgaagctgacactttcctcgctctcgtgtcaagagactacctcctaccttttaaaccatgtgactattttatgtcttgggccctgacacctcgctcacccaataatgcaaatcagacaggctgtctccctgcggtgtggagagagacaggtccattcagaactagatgggtaacagcggacatccgtcccagggtacgtgtcacagctcaaccccacgagcacgttggtgtacggtccggtgcccatcaccctggtctcgacctctgcagcgccgccccgcgggggccctttctgcgagtcgtggaggccggggcgctgttcccagcgctgccgccaggggccaccgccgctcccctatgacacagcaacaataggggccgctctggcccgcgcttccgccggaaacaggccgccggcgcggaggcgggccggatgcgatggacggtgaccagggccaatcgggacctggtcggggccggccgcgcggctgacggaactcaatccgcggcgagagcggcggcggggcgggccaagcacgggcttccggcgaggcccggcaggcgccgaggaggaagagcgagcccggacggtgcccctaggccgagtgtgagcaccgccaggtaggggcccggtggcggcagcggcggcttaggcgcacgcggctccaggctgggtcgagcggcgggaggacgggacgcggcagcagccggggggccgagtcagtccgggccggccgccggtgccccagacgcgccggggccggacgcagcgaggctccctccgcacgggcgggcagtgacgtcgcgggagcaggggctccgcggggctgcgctcggccctgcgcacagccctggccttgcgcagcctggcgcgctcccgctcccgggcagtcgcgggccgaccggcgtatgggtgggacattgagcacgcgacgcggaacgacgggcctcgctctgttttttcaggatgacgacttcaggcgctctgttcccaagcctggtgcccggctctcgggggtcttctaccaaatatttggtggagttccgggcaggaaaaatgtcattaaaaggaactacggtcaccccagataaacggaaaggtctcgtgtacatccagcagacggacgactcccttattcacttctgttggaaagacaggacctctgggaccgtggaggatgtgagtgcctgtagccagaacaggccagcggggcaagagcagggaatatggcttcatcttccatagattagtgtaggggtcccaaggttggcagagtgctccagtcactctgtgaagccatgcaccccgtggtgaccatggttcttaaggttttagcagagacagcctgctgacagggtgatagggtgggctggtggcctcagccctggccttaaacttccagtcttgtggaggagtgtgcagatatgaccctcaccacagcctcgggtagtttagcgctctgaagaggctgctttccttggggctctttgtctcccaaagtacattgttctttgttacacttaggagcagctagccagagttggttgaccttttacttcttggaacacagttccagaatgtttctgttaagtcgtctggtcctcagagagcactttttctattcctccagtctgggccctcttctgtttgtcttcactggggtctgagacttcttgactccaccctgttattggggtccagcaaatattcagggacctaagccttggtggtacacacttgtgtgcctctgtctatctgtcgtctgactgtcctccttgtgtcgccaggacttgattatctttcctgatgactgtgagttcaagcgggtacctcagtgccccagtgggagggtctacgtgctcaagtttaaggcagggtccaagcggctcttcttctggatgcaggtaagcaggagagtggtctactctgtctttccttgtgattcacttggggttactttccccacattagaaggtgctgacctggagggcctggtctggctgcgttcctaccacggtggctagctggtggttaggcaccggagccccgctcgtggacttatctgtaggcacacagctccagggcctcaggtcttccattactccatggccacgaattttagctcccagaggtgacgccctctgttctctcagcagttgaacgtcccccacttaagctcttctgtgctgtgtgttgcgaggcccttcagtgtcatggctcctgcatctcacccacatctgcagtgtccctcaaatgcagtctccacagtctgccacctgttggagaccattggcatatttgtgtttcttatactgttaatgtggttctgctgtggtatgggacatgggctctctcttgggtatgtgggtccagtctggagtcagggctagacttggggtatgttcaagggtggggtacacagccattaccattgtcatcctgtgaaagggggcaacaagcagctatttgtctgcaaagtaccaggaggggaggggcttcctctcagcctgggttctggtcacctgagcacaaggatctagaacacagagaggacaaggggtgtggcccctttgcctggtggtggggatcagttcgttccctgcacggctcaccaggagccatacagtgaaggcactgcagtcttgcattgtgatcattggctctggggccttctcactgttgccattgctgtcctattgagctgtgctgtcacatttgtagtgctgcctctccagtcactgtgtgcgcgcgctgattgaggctagctggccacatgggtgcagggagccgctccttgtgcagactgctcagctttggctctttgcatatgctctctggcaggagcccaagactgaccaagatgaggagcactgccggaaagtcaacgagtgtctgaacaacccccccatgcctgggtcactgggagcaagtgggagtagtggccatgagctttcagcactgggcggtaattatcacctagacctgcgtggggcattgtccttcagtgactggggacactgtgaggcagagcctgcttgataagttctggttctttctttcctcccatctacacagagctcacctgctccctgctgcctccttccagaggctgttactccctcagtggttcttgggtagggccaaggccaagcatctgccatagagtgcagtgctcacaagggtctaggtcctggccaaggccaccacagcaggcccatgtctgattcctgtgtttaccaggtgagggtggcctgcagagcctgttggggaacatgagtcacagccagcttatgcagctcatcggaccagccggcctgggaggactgggtaatgccccgctgtccctggctccctcccataggtgccctttcagtgcttgcttgcagacccggggttttctctcagccatgtctgtgtgttccctgtgccgctcctttggaaggtgcttgtctgctgggtgggtggagagggcctggtctagcatgtgtatatggagtttacctggggtacagcacaagtggtacagttacttagaaggcactgttctggctgagattggcctgttcgtgagtatgagtgtgggtggggtggaaatgacctaactcagtagaatagcttttagaatgcagactagtatggcgtggtcactacagcctcttgtggctacctaaccctccctgttcatcccttggtgttggtattggaatatgtagcttctcttactggtggacatgggttagtgtcttctcaagtgggctggagggtgtatctagcacacatttctttatttctgtaggtggacttggggccctcactgggccaggcctggccagcttgctggggagcagtggacctccagccagcagctcttcatccaggtgagctccatcccccaatgcctgacatgaataccaggcactacctagcaccagccagcaccttctccttttctgaactcactcaggagatagggtagagggtccccgttacctcaacttgttgcctggggaggtgggcctgcagacctgaggagtaagtagccctgaagcatggtgggcctagctgctccagcccttgctcactttccccagctcccggagccagtcggcagccgtcaccccatcctcctccacctcttccgctcgcgccaccccagccccttctgccccagcagctgcctcggcaaccagcccaagccccgcacccagctcaggtaatggaaccagcacagcagccagcccgacccagcccatccagctgagcgacctccagagcattctggccactatgaacgtgccggcagggccaggaggcagccagcaaggtaaagagctgtgggtgggtgctcacagggtgaaggactgctgaccataaactccatgactcctggagatgtggagcctggtgtccatggcgtccagccacacctgcctacctcatgctgccctgcggacaggctcccagtctcctgccctctgggtgcctgggttagcatcaggccactgatggccaccttgcttgtgccctagtggatctggcgagtgtgctgaccccagagatcatggctcccatccttgccaatgcagacgttcaggagcgcctgctgccctacctgccctctggggagtctctgccccagactgcagatgagatccagaacacattaacctcgccccagttccagcaggtatggatgtccatggcactctctgtacctgtgtcttttagctttggtgggtctggtgccttcggcacccaggtctgcatggctgctccttgttgcaggccctgggtatgttcagtgcggccttggcctcaggacagcttggccctctcatgtgccagttcggccttcctgcagaggctgttgaggccgccaacaaaggtggtgagtactgatcccccatcggccagagccaaccctgtgtttgtggaatgctagaggctggctgcctgggtggtagccctagcctgaggtttagttaggcctctgtggctgtttcagatgtggaagcatttgccaaagccatgcagaacaatgccaaatcggacccaaaggagggcgacacaaaagacaagaaagacgaagaagaagatatgagtctagactaaattattcagtgtccgtccccaagttggaattggtagctgtgtgattccgtagtggtgattgtgatttgcccacctcactaataaagtccttccttgtacctgtccagtatggtctgggcctgtgttacttgcatctctgctctgggctctgtaccccaccaccattgctgtttataaatcaacacactcaagtcaaacaagtcattttaatttcagatctcagtactgacagttgttgggcaggaggaacaaagtataaatataatatctgttctacagagtccttttcctctaaaaagacagtgtaaaccagaaatgacttgttattcatagaaagtgtaggcaaaccccaaggtctgggaaccctcaatgccaaagtagcggggagacactgggcttggcctgcctctgggtcagtgcctttccctgcttggaaagtgctagggttcctgaggggcatccgcgcatccccactgccccctggatttgtacagaagcagtcacgttgacaggggccccattgatcagcagcttcctcaagcatcctcggtaggcagggagctctggccgagcagttgaagactctgaaaatacagaggggccagaagactggtgtcatggcggctgggtcctttgccccctgcattagctagtcagcctggccttttgctaccttttggaggaagcagagggtagtccgtacttactgggcaggctcccgaggtgcagaagtgctggagaaccagccaagctctctggcaaacggcctgtggtgtggttgctctgtgtgtctacctccagccggagtgtgtccctgcccatgatcactgtggagcagagttgggttccctagccagccaaaactgcagggtcccttccacaacccacccttctctgtaggaaaggaaaagggtcccctcacctgccactcggtgccaccgtccatcacaaagcttggggtaggtcacccacgtggaaaactcccctgccccatcatttgcctgcagcaggacctgggatgaaggacagttagttctgcccatcagaggccacagtgaagaaacggtgacccccgcaccacagctctgctcacctgttctgtcagcaccttcagctgcatgtagggagtggccagggcctggcccaggtggaagatgaggccagcagctgccaagggccgcatctctagctccaggctcacatagggcatcttggccttggggagctctgtggggaggagtggtgaggggagacttccagggcctggcttagaactcctattcccacaagacctcccttgcctcacatacctaatgtgacaactccctcactgcctgggaagaacaggccatcttccagggggcctgagacacagggtgtgacccccaccatttgcgttggggtcctcagtggccgcttatccagctgtaatttcttcagacagccgctgaaccccacagacacctgcaaggagcagatggataacataaggcttagactgctaagggtggacacccgggcctagaccagggatgggagcggtatggttctcacagggagcttggaactgtaactgctggcaggaagacctcctacagagagggtgtagggctgtggtcgctctgccctggggacccgatggtggagagccttctggctccaggtctggctgccgtccaccacaagctggatctgctgcattccccagcggacggacacctggtgtggggagaatcgcagtcaacagtatcccaggaccctggagcttgaggagctggagggccactgcctgtgccctgccacccaccctctctctgtaacctctcaccctgtgccactggccagcccgtgagtgctggcgactctggacctggagccggggcccagggccctcagtctgtgcgacaaagtgtccatggtttagaaagagtaccaacgaagggctgcggcccgacatgggggctgtagagagcaggaggccctgggaagccgcatgtggacggacaagcatggagaggtggagcctgaaagccaagcatggtgtcagcacgggcaatacctccaatcccacccaagcctggcctggccaaccttacctattcctgtgggacggagagatacccacaaactgtaggtaactgggcaggggtcccccaaactggtatgcatcctgaatagtcccagggagccagggtgtcgtgcaggcaaggtcctggctgggttgtcgactacggcgggaaacctaaggtacagaccaaaccacaatgcattggccaactgcttgacagccccagctaccccagtcctgcccacacaccactgtgggtcccccaccttctgagccgtggcccttgaggtctcgatgagttgggctggtgtacagcctacgcttacattgacactccccatgttctggtgtaggtcaaacacacgctgtggtccccgaagtctgggagggggcaggggcaggtagatagatatgtcagtaactggaatgctggggtgagctgggacttcattccctacacccaccagctcaccgctgtacaaaaacattgctgatgcagccactgaagttgtggaaggtaccagacacaggcaggcctcccaggagaagccgtgagggttcctcgggctgtagttggagcatgggagttgttctctcatgagactttactagttgtagctggtcatccacatacagccataccctgggaagaagatggtgtttcccagcccagcacattcttcctgaagacctagcctcccccaggccctcctgtggcgcatactagccctccttccctctctgcctgaggcagggctcaccctgtgacattgctatagaaggcaacatagtgaggagcaccatcagcaaagaccctttgagtttccacctcttggttcataaaacggagtgtcacgtggccctccctcagggatacctggtacggcccatcctagggacagaggcaagatcaccggttaggccaagagtccagactcatcccttcttgcccctacaggcctagactgttggctgcagcagaagcaagctaccagcagctcaccggggaggtacggtaatacagcaggttgttgtcctgggtgccacgaaagccaaagccagaatagaccacttcggtgatgggtgccacatcaggaagtgccaggggcaggaagccgtggccgtgaaaagtcatggtgcgtcccactagcaggtcagcggtgcagccgaaactgatgcccgtggtgttcaaccgtttgaggtccacgtacttgcccagagccttaatacccttgatgcagccacggacagagcctccggaggggaagagctgccgtaggctgcgggacaccagtcaggtcgtgagtggctgccgtagtggcactgggaccccacgtaccccagggcccatgctcacctcaagggcagctgttcaggtggcacacctcccaagtagtaggcatcagccatctccagcatgttatcctggtctacgctgaacacagtggcccgctccacacgcaccaacacacgtttgcgattgccagccaatagaaacacttggatctgcaagggatgggtagcaggcacaggaaagccaaatttctctgctggtcctcccatccccaggccccttccttgccttaccgccttgctggctgccgtcaaggcttgtgggggctgcagtgggtcggccttcttcaggccagagccgaagtcatagaagagcaccagggtgccttcctgcactgccaggcacaagaactggctctgcagggacagggcagagcgaggtgagctcaggggctttaggaagggtcacagcagggcaaagccagaatggggggaggcacagggcagggtgggacatgggggtcagctgtacctcttgcttgaggaaaaagatgatcccattgtaggacacaagccgcagctcctggtcaaagcgttttgtgttgctgaactgcttctcaaagctgatgcgggcaaagccactgccatccaggtaggagccatctgtgagccatgggtcaccggtggccttggagctgcaggttggaggcctcaggtcagtggagggcgggtaagtggagttacagggtgctgctgggccttacctaccgagcacaaggtttatctactgccgtgtccagcatgaaggtctgctcaaaattgtagaggctgaccacctcctcattcagtgtttccatctcaatgcagcccaggtagccagggaatcggaggggttcagggggctgggggtaaagtgtatggtcagggcaccttcctacctcccagagaccaaccacactcagactgcaggagaatgaacttaaaagcagacaaggactattcctaggtcagggtaggcaggattgcccagacactcgaagacaaccccaaggctgagccaggcccaccgtgaagttgctggggtatcctcccacgtagaagacaaaatcgtcaggatgcaggttgagtagtccctcgctcccaggggccaccgtgtctcccttgatctcatgaaccatctgtttctccacggtgacagacatgtggccaaactggagggtcctaagagcagaggtgaggggtgagacacagacacagcacctggaaatacaagtctaacctcccatcaaggcaaccctacctgtcgatgctgacggctgcaaactgctccccgatgttctcgtcgatgctgagagttgtggggccagcctttcctagcctgtacacccagtgcaccttctgattacgcagagacactcccatgtagtccccagtggcctgtggcgacgggccagaagacacagttaggatggagacccaacaccacccatttctaacttgcagtccgatatagcccattcccccccccccgccccccggcctgcttggtacctggcggctgcccatgtacagaacaaagtggtcccccgtgttcttgccaggttcgggcgctggcactgggctctggatgtggaacttgagggcagtgtacgcagcaaggtcggcaaggtctcgtggggtacgcagtcgtacccctgaacgcccattgaacttcatggacaccttgacctgtgagtgtagcacgagagggtttactacctggcttcccaggtccaccgtcaccgcctacatccaaggtgagcacccaccttgctggcggcactccgggcttgggcaatgagcttgcgcacacgaccaatgttggcagacaaagccaggctggcattgtgaactccacggttctctagacggctcagtttggccagcagctgtggcaatgtcttctccagggtggacactgcaggaggggtggcatgagaatcttgtctcccacaccttggcccccaggaaggcaaggaccacttgctcacctgaactgcttgcatcccgttccacctggctcaggtcctggccttgcaggcctcccagctggctctgccacctctccacattcttctgcataccctgaagctgagactgcacgtgggtggccgtactgagggcttcggcagccacagccttggcgtgagcaatcttctcactggtctcgcctgtaacagatggagaccattcccagcagcagccaatttcatgttcctagggccctctgctgcgggaacccacccctgtggatagcataagcgccatacttgcagctcaatatattcaagatcctacccacgcttctcttcatggccctgtaaccctccctcccaggggctattaccaactcccaagtcttgcctggtttctaggtttgtgcccatgagtgcctgggacattgggacattttggtggctacagagaaacccagacgacagggtcagaccatgctgttgtcagttctgagctctcttggaaaggcagccagatgaaccccactctgacctctgtgctcacaggtcagcaggtcttttccaggaatgcccttctcccaaaccaaggggcacgctcctacatcctccagtaactaccccagtgccaagtgcctacagggccactgtgtcggtgacctgtgccacccatcagaggcacaagcccagagtgccccttggcactcgagcctcatcggacacactaaccacagcatggactgactcattaggtactactgagtacggaagagtgacaggcaagagcaggaagaagccacatactcgtgtccatggccagcatggcttgtgcctcctggatctgggctgctagctggttcttcctggcccagacattatgaagctggatccccgcagcctgcagacggccctgagctgtggagggaggggaggcagcctcagtggcaagaagttccacccaaccctcctggcccacaaatggagtgaggacaaagataggggccttgagcttcattcatcctaagacaggcagacattatcgccaccccccccccccccccccccccgcgccagtagatcctgtggagtagaagacacatagggcaggcacatttagtacctattgattcttacactgaaacacactagaatcatcccgaagctatagggacatgtcccagatatcagtgtactctaggatctatgcactcaccaaggcccagcctcccctggtgtccaaggatggtctcctccagggcactgctgttggctaacagctgccgggctccagctgctaggccccgctgcaccaccatctgcagaagatcgggggctgtttacatgggaccgttcacaacatcaggcctgggagcagggctcctgcagtccacaggatgctcagagcctcacctcccatgtgcggctggcctgcctcagtgcctggcctgccgcatcctcggcagcctgaacggcctgaaggatgctgctgtaggcattggaggcttccacagccctctggatgaagcggtcctgattgatgccaaggatgatgctgccgggagggaaggaggatcatgggatgtgtggttaggtgtgccgaagagtatagcctggctggtcatcttctcagggcgtcttattgctttagatctgctcctttctgccaaaatttgggccccaaacttcccatgaggctacaaaaagcctggctccttcaggaatgatgactgtgggccaaccggggcacccttgggagtgccacatacccagacaggttgattgccagctggttcagcttctgagcgtgggcctcagcagcctctaccaagtccaccttgctgctggcaggggaaaaggcctgcatcctcttcagtaagggtgtccaggctccatccaggctggccgccaggtgctctaggtcctgtgatggtggtgggcgttattttaattaccctcctaatgtggggccagggaatccagcatagcttcaagctggcagcaagcagaaatcttagaggagacttctaagccaggaatgagtgatgtggagggtgttgtatttacctccttagcctggtctatgccctgcagaagctcagaaacatggcccaagatgagactggcagcttgaagagtggccttcagggtggcattgtcctgggacagttcctgtttccattgcttgggacagcattttaagagagcgggaagaaaggctgtaatgggggggctctaagcaccacagagcactaagtgggggagggggagagcaggagggaggggaggcctgggtctgagagaacatgggggacaggcagaaaggaccaagaagaggaggggagatgtagagagaggagggagaacagggaaatagttgacagaagaccagggcctggggaagaggtggccagagagtggaaagggtgggagacagggacacagggcaagaagcaaatatactcaccagggcttccttcagccgttcctggttgcggctgttgagttcctcagcctcccgggtggtattaacggcctggttcagggcctcacgaagatccatgaggccagactcatactgagccagctggtcccgaatgtgtgtggccaatgactggttctcctcccagaagctggtcagctgctcctggacacgagccatcactggccaacaccagagtaggaaggtggtcaccctgctgcctagaccccgtcatgacacccctcccctggtcactgcccagcaccggtctagtccacctcagaagcaggccaaccttacatttggctccagggctcccaggccgtgatcctgagcagccctgcctaacagggtttgaccccacttacgcctctgggcttcggccagttcggcctctgccactgccccctgggcccccaggtcacgcgtccgcatatcccagagcagccgctccacttcagccagagcccagcgcagctgctcgccagacggtaccaaggcatcgcctggagatccttggcccatgcgagatgccagctctacagagaggggattgtcagggtctggggctagactccatcacccacttccaagcctgagagctgcccaaggcatttcggcaggccgccagcacatatcccagcagcacttcacaggctcttggagcccaagattaagacccctctctgcctttctgttaatcctgacatgctggttcagccttcctcaagcagaaagttcacttttccccactcctttggctgtgccagatcctgtcataagattgggagccctgggctggagagatagctcagcggtcaagagcactgactgctcttctgaaggtcccgagttcaaatcccagcaaccacatggtggcgcaaaaccatctgtaatgggatcctatgccctcttctgttgtgtctgaagacagcgacgatggtgtactcacatacatgaaatatataaataaatcttttaaaaaaacaaaaaacgattgggagccccagtttcctttcagctgctgctggtctgtactcacatacatgaaatatataaataaatctttaaaaaaacaaaaaaacgattgggagccccagtttcctttcagctgctgctggtctgttcctcactaaggtttgctagtactccccgtggttctatatgatccactctcccagagaataaacacacaggacccagccagctcaagaggagacttccaggaggccccgcccgtcccacccctccaagcagctcaccctatactgggccaagcatcaacgagagccttaccattcagggcacggcccacagctcgcacagactccaacaacttctgtgcccggcccagtgtggactctgtggtgtccagtagctggcctgcctgaccttggacccctgtggcctgtgggtacagtttccttcagctgtggtgtttgtgggtacatgactgagggagggcaggataaaaagggtggcacctgggatgagggagggtggctttggtgtcaaggactgggagatcctgaaggtgagggctcctgagcagaggcaccacaggacatgggatagggtcataggtcttgcctgactgcccagcctctccgtgtcctgttgaaggcttatactctgctgctctagagtctgtagctgctgtgctgcctggtagcggggtcccggtgggctccggagtttactctgtggggggcaggaaggaggttaagtaccacacggccagccagaggaggcagggcggcaggcgggtgggcatgaaatacctgcaggtcagcaatggaggcattcagcctgtgcagcctggcccaggccgcggagctggcattgataccctgcagctgctcacggatagcggggaggagggcaccagcccgctcgaggtcatccagaaggagaaccacacagtggtcacacactgtaggcaggggaagtgggtacggaggacatgagtgagccagggaccacagagacaagcgggtcagcacaagaaaccagcaccagggttatgggtaataaatatggagtgaatgggccagggcagaacttatcaggaaaacagggtcagcaaagcatgagaggctggcctaaaagactgaactgtgccggttatgtcaaagttagagggacacaaggtcagcaaaggcatcgtcccagggtcaagtgaaggtccccatctgggcaggaggaaactggatgggcaggaggaagctggcctgagactatggaacactttattagggagaatcccgggcagtgagatccaccgaagggacagtggccagtgttggagcgacatccccacgtgggatgtttctcaaagggtagatatcagattagcatggagttgtggaaatcctcagaaaatggatacgggcagctggggtcgtcccctctgggatgttgcgatttaatacagggaaagaacgttagcccatcaggcctgggaaccccaaataccaggcattgtagaaatagtggggaaagatggagaacagtagagtgaaggcttaccttcacagtgtatgccatggcccccaggcttgcccggtacaggcacctggtgctgctggctgcaggtgtcacagcgttccccgctgagccccgggggacaggtgcagtggcccgtgtgtgggtcacagtggcctcggggacactggcagcctgcaggaagaggggtaggcagatgtgactggaggcgctcagggatgcctgcctctctccaccctgccttcccacagtcctgtactcacgcctgcagcccttctctgggaggccccagtagccaggggcgcactcgaggcactggggtcctgtggtccctggctggcagtgacactgaccgctctgagggtggcactcggagcccttggcagctggtccacaggcacaagggcggcagccctggcattgctcaaaaccgaagtatccttcctgtgataaatcacgtcgtcacagcctgtctagcccttagcgtcacacctggcagccctggaaacctgggctagctcaggctcctatgaccagcccaagctccccccggcccatttctccacagaccaggactctccctcagcacacttcctccctcctagcccaccccgttctcaggccactgccagccctaccaaacagcggtcacaacgttgtccagtcacgcctgctttgcacaggcagcgtccactctggggatcacaggtttctgtcccacatggggaacagtcacaccctgcagaaagtgagggctgcagttactgccctgtcccccagttcagttcctcctgctgtttttcccgtcacttggtcctggcctctcacaccccacattcacaacatcactggtccaatttggctctcctccttacagccccaccctgaaggggacaaggcaaggacagggtctgaccgtgaagctggcgactatgtgggaaggtggcctggctacacccgcatatagtctgttctcagggtgcacccaagatcccactcagtgcttacgggtgcagttgcctggcaacaaagcattgccatagaagcctggggcacagcgttcacagtggggcccagtggtgtgacggaggcagcctcgacaggcacccgtcagggggtcgcagtcactgaagatcatgttggggtctccattaccgctgcagtcgcagggctgacaggagctgcctagcaccagggggttcccaaaaaagccaggtgcacacctggggatggtgacaaggagaggagagggagaggtcagggtctggtggccctactcagggcaccctgttatcgattgagatccaccccgcttaattaccgctcgcaggaggcaccagcatagcctggcctgcagaggcactgggttcggccatttcttaagacgcaaccgtctgcaaaactgtaaggacaagataagcagttgtgacacagcagcacctctccatcggggcagcctcaaggtacaggggttcccaccatctccaccagggtagcctctcggtgcgagggttcccaccccatccatcagggctggtacccggtactggagttcctacccactccatcagggcagccttgtggtgcgggggttcccaccagctacatcagggctggtaccccatgcttcccacaccatccatcagggcaggcaccaggtgctagggttcccacctaatgggcccgccccagctgctcaggtgctgcagaggagaccagctacttacttattggagggcactgccaaggggcaagggcagctcacacatggggatgcagggttactgggatcactgctgacaaagccaggcctacagcgctcacattggtccccttctgtgttgtgctggcagccctgggacacagtccatggtcagtgctgagagcagcaagccccacttcaccctacctcaccccaactccagggacagctctaagccagctagtatgtatcctgggcctgggtctgagtttatctggaaccataggccctggggtcttcctggccacccttgtttagagtactcaccacacaaatgccagagccaggaaggcagcgatctgaatggccatggcactgacaggggacacatcggcctaggaagagacccttggtgtcccggtaatagccaggggcacattcctggagaaaggcaggtagggcattagtgactggatgccagccccacggctgggcagactagagaggctgctctcccatcagcctctgggaccttcacgcactacagaggctacagggacagcatacactggatcatagggagttggacaccagaactgctggccatgtctgttgggcttctagacttatggacactgtgccagatgtggatatcacggctcaggaatgaccagcctgtgggactagcgacccaccagggccaccttctttctaccctgaacatctttttctagtggtggtcagacataaaccttccctgggtatcatgctagactacccagatccccaggtgagggaggagagagtgggaatcagggtggatcagggatgctgactgtgtgggtcctgggtgagcaatggacaggtcacggcagctgtgtgtatggagcggtaggcagtggtgaatgctgggacagcaggtgaggataagcagacacctgagcaagcatgcaggctgagagggacagagaggaagacactcgggcaggggcagacatgggacagggtagaaagcagatgctggcagagtatgcttggggaaggacccgcggggagcaccttcatggctaagcgcccaccctcacccctttacctggcacgagtccccacggtagttggcagggcacatacacagttccacattgctggctggaggccccctaccagcctcgctagccacctccagtaccactctacgcaaggagacactggaagaggtctgcgagaagagagcacggatctgcagctgctccaggccggccagcaccatcatgagttcttctcgggacacggggttgtgagtctccaagtgccggaagttcccctgtggggcaaaggtaagacttcagctagggcagagcagggaatgcagaactgaaccccacggagaggatggggtgcatgcacacagatcgcaggaggagggggctcccgcagtcacccgtggtgacagtgagcagctgggctcctacttcacaactcaaagtcaactccaggtatattaagaacttaaatacgcaaagcagatagttcaaattattaaaagaatatataaatgggccctttctgacatcagagaggcaaatattttcccaaacaagacacacaaactgaataatcgtgaaaacctgataaacttcaggttatcaagaatctgttcatcaaaggaagttttaaaagcttctttgggccaggcgtggtggcaagagacaaagaggagctcccacagtgcctcagagcccgctcacccactgtgttcgagggttttagaaccagagattctttagacccatcatggatgatcagaaaggaaacccggcagcctctgtctccttctaacatcagcattctccatcgtggagacaatgagagcagcggctcctttgggcccttgttgggctccaggccagctctgctcacctctaccagctgtagctgtcctcggtgaacctggccaggcggagggtacgccagttccaggaaggcgatgctcatttggttgccctgagaaccagacacatggaccaggtgagggctggcaactgggctggtccactatcccgttggccacacccactgcgccccacaacctgcagcacgacgtccggccggctctcgtagggaatgaagatatcacctcgctgggtctctgagtgcagctcatagtggagggttccaccgtaggatgacacctggagccagcacagtgggaacggtctccctctttgtcacacccacccttacccacaagcacccttacctgggcacctctctcctgctccctttacaatacaatgtagctccaaggtcacatccagggaccacattgccacccatgctccccagtgccccagggtgcttcctcccctcagagtacaacccctcaaaccaaatgctcaccctgtctcccagataggagggcggagcctgccagtacagctctgagaaagtgtcagccacagagcgcagatctgcgtgcagcagctctatctcaggccgatgctcgtggggtaccacctgccggtcactgctcaacagcacccagccctccatgtccacgaactgtgagcacatgtgagggtcacagagtggaaatgtggccttgccctgcactgtggggcccctctagtggctcccacctcagtcccaggctagaccaggatacctcatggcgggcgaggttagagttcccacagcgctctgtggccccgaaacagaagcagcgggtacagcccttggggttagcagcatccaaggagaaggtccccacgcgacactggtcacatcttgagccctgcacgttctcctatgggcagagaacaatcaaggccagttggctatgtgctgagagccagacaatagaccagttgtccttgtcccccaaagcttccagaaagccccatctgcccaggaaggctgctgaggaggaccatggctcaactgaagcagatacgtagtaaggagcctgggatacaagcccctgctcaccttgcaatggcattggcctgtgagggggtcacacacgctagccatggtgcctgcctcatggcagtcacaggggcgacagctaggatagccatagaagcccggggcacaggtatcacagcgacgtccagctacattgggtctgcatctgtgtgcggacaaaggctaggtgagtccccctctagccctgggtcgtgcagatcccacaggactccggcccctagagtgtggtctgagagtaacaagactgcggtgtgaaaggcgatgctctccctgacccaagaccccacaccacacgattgtggggtgccgtcggctgaactcacctgcactggccgctgtccatgtcacaggtagggtccgtcagctcctggacgccgggccctgagcagttacactcctcacagcccaccaaggggtggcaaccaaagctctgtggctggcagaccaagcagtcagggggaacagtgcgtggtggacagatacactggcccgtgagctcgtcacacaggcgggctccacagtcacaggctgttggggtggacagcaccggttgacccctctgccccgttcaagccccaggtgcagcccataaggatgtggtagggaggggtggggacactaccctacttttacccctgccaggctcctatgtgtcactgttagggctacacttcctagaccctattagacaagcccacgaaacagtgcgcatcacccaggctgctagctgcctgaggagcacagacaggaagtgccatgcagttagtgagcacagacaggaagtgccatgcagtcagtgaggctccagaacgttcccttgcccaccatgcacactggctctgattctttgagcactggatactcacgcctgcagttggggaaaccccagtagccggtggcacagcgggaacagtcacggccaataacgtggccccggcagggacactggcccccgaagggctcgcacgtggggcttacggcacccacctcgtggcagccacaagggagggccccgttgttgtagaagagagacaaggaggtggcggcattccggcagaatggagatgagctgctggggctacattgggggtaaacagtgagcctggctcctggcctgatccctgtgctccggaccccctctcccgccccaacccagcccacctaatgtggtagccctgggtggcacagtggctgatgaagtcataggatttgtccaaaggctcctcttggaggtaactggagctgtaagcatcctcagggacaatgagtacgtagtcctatggaacaagaccaggtggtcatctttgcaagggtctggcagaagggcctggctggggcagactcctcagactggttaaggccagagcatggtagtcctagtctggcagatagtgaagggacagcaagccaaacatctagcattgctcaggtccccttttcttctctgttacccagcctccccttccacttctgtccaccagctgggcttagtggctcagagcctctcccatggtgcacctgtgatgggggataccctgacaaatcaggtgatacactcgagctaagacccacagatatgggacgggcgtaaagggaaggccactctgcaagtggcaaaccagccctgaggctcaccagccagagccaccggccttctggcacacgcacagtcacggtgagctcgttgtctgtaacatccagcatcgtctgaccctcacacaacaccagggtacggcagccataaccatgaggacaaaagctggcgttggcgtggcctggagggggtcagaacaggaaggtcaggcctccagtatcaaccactctagccgcatggccgacggatcctgggtgtagggcagttagagatatcagggaacaaagataggacaggccttgtgctaagaacttcaggtgctggaatgtcacaggcagagagcctacctgggagaccaggcctcagtctctgtgaatgatacatagccacacatgatcgagtaccccacgtacaagtgaccgagccctccaagcaccttataaaccaacatttgtctcaccactcctgacagacgtgaagagctctaatacagggaccgggtgttggtaccactcaccacaaccactgggcacttggtttgaaaatttgacagcatccaggttttcctcccttgctacttaccctgccagatgcggccaccattaatgagtacctccacagggaaggaggggtggaccggctggtagccgtgcagcagaaaggcatagcggcccagggtgggcacctgggtggtgaagaccaccgtgccctgttgaagagtctctgatgagtggccagagtaaggaaaagctggtcccacctctgtctgcagcctctgtcacggggtggcagaggacagggacccagagccctgccctgcctcacccccacccatccctggagaggcttccgtccaccctgagccctcacctgggggtggcgcagcaaggtgggttctgcattaggatccaccgcagttggcggccgaggctgtggtccctcggggggtgcacctggtgagagctcctgagactgagtcagaggcaggtcgggaggcagcggcaagacctggcagtccttaaggatgatgggctgcggtggcttcgggaatcgggaggctagacaggcagcactgggaagcactgtgagtgagaacactttcctggctgacaggtccctggctcctcaccctagccactcccagccccagtacctgctggggttgaaagttccatgactgctcacacagaagacccggggctccacaaactcagtactgaactcctccacaggtaccagggtgacgctgtgctgtgggggaaaagatgataggctgctactccgcaagcagctgaggacaggaggcgcggtgggatcgggacggctgaccacatactttagatgccaggagtcggctgagcctacactccttcaactctgtcttctacctggagcctacactcgggtgcagaagtggtgatggtttctagggttgtaccccaaccctcgtggtatccccatctatctactctgcctccatctcaccttctatattgggctctcagctcagaaggcaagaacacggccagatctcacaaggcaagaccaaactacactgcagccccataccacaggagctcctggagcccagagtctctgttctcttttttacattcttaaaatatgctagcagatgccaccctggggcaagggctcaaggagctttaccaggaagaagtgagcttgctcagctgtgagccggatgctagcctcagagtccaggtagaagatggctagatgatgctgggtgtcccgagccggactccggcacagggagctgagggagggatggactgtaaatggaaaacccagggcagggcccttccatccgccctttcctgttctaagcttacctgtatgggcaggggtggaggttgagcaccccttgctggggggctctctgaggggtgtgcacagccactcccatctcttggtgtgaatcctcaccgacatattccaccacgagaacatattggccaggctgaggcacggccatctcgagctggatgtccacctgagggagggcaaggtgaccagagccccatagtcctcatccttcccatggcttcctacagctagatcttagagcccagggcatctccaagcaggagagggctgatccaggtgatggaggaggcagaaaagctaggtgaatctgcttcacacccagtgtccattggggacagccacagccactccaggccgtgcacggcagctccatcatcttacaaccttgtcttgcatccactccaccactgagataggtccctcctccagcctaaggtccacagcacccactcccccacaggccctcagatacccacatcactgccgaagcaggtcgccagcggtgggtgtgaggggctgagctgctctgtggggcagggccggggcaggctgttgtcatggcgacacagggcctcagttccagctgctgaagggaagccatccaggggtaggtgagcatagacaagacagctggagaagagagacagaagtcagcacaagtccacccaggatccagccccaactcatcctgcaggaccttacttctctgtggagtgcagggctgagggacggtaggtacaggcctccgttactcgatgctgtaggagagctgcctcatagtaggtgctgggcagtaggaccacgtagtcctgagagaggtgcggggtgagtacaagagctctggggcccagagcccaccccgccctgccatggcccttgcctcaccaagagtacaccttcagcctcgaccagcaaggcccagatgccggggttcagcacaaagggttccccaaagcccctctggggcacagtgacaaaggcaggctcagtgctgggtgggaaagccactggctggctctgctctgtgcctggggtgggtggagaaggtaagatgatcaggctgaatccacagaccacccaagtctgtacttcccccatgtaacgtacaactcccaaggcgccaggatgaaggtgatacaggccgggtccactacccgcatggcttgggtggtatggggtaggaaaggaagcagtgagcagaccccactcacagttggtacagctggaaagcttgccctcttcacgaacagagatctgcccattcacgctggttgatccacggttgacatatcggaaaaccagccgaaagaggtcaggggaggtcacgttcagcctggccacaatcctgggctatggtggtacaagacaacagcgtcactcctctgaccgtcaacctgagtcccctgatccccaggtgctgcttgctctgctggccaccccagagacccagcagctcccatctctgcaccaagcccagggagggggcagcatggttcacctggatagccatcatgtgtgcgtagcctctccagctaaagttctcaaactccagggggttgaagccaaagcgtacagcgtggccctcgggagtggccgcctcctctagttccagccgcatgtggtgcaggtctggcaagtagtggtccttcgctggcctgccatgaaacaggtatctgagtgggacaggcatggccctacatggccacccagatttcccaggggtagctgggtaccatgtgggctcctggcaagaacacggggatactgttcatgctgcctccccagcccaggcccagtcagtggaaggaacttactcgctacaggtgggtccttgggtgttagggcggcacctgcaggcacctgtctttggttcacagccttgacccagggcaccaccaacatcacacctacagcctgtgttggggggggtgggggggaagggtcagaggctgcctagcccctagcaccttcaggggcccctcccacaaccctcctggttaggccccataggcacatctctctctacccacccttagtagataaactaacatcaactcttcaggtctgctttggggggaggggtaagggatctgggatggattagtgatgtctgttacgaacacaggatggagcaaaggggccatgtgtcagaacagagatagacccggcacaggctggcggtggcggggtggcgtatgggggggttgaacatctcctcctcttgctattgtcagggcgagacccctccgtgcctgacccacttgtacctccctgggcctcagtcttccagcgcgggggtgggggtggggggggtggggggtggggggtgggggggtgggggggttgggcagtgtatgagcacttactacggcagccaaagtagtcagcataatccaggccaaagaagccatccttgcaggctgcacaggtcttgccacacacgtgagccttgcagaagcactgcccattgccctggggaagaacaggaagtgagacttggtgaggcaacacacttaaccctagaccccaacctgatactcaggcactctgacttacctggcactcagtaactccacccagggtgcctcgtgggtcacagctgcagcctgaggagagcagagcaggattgaaagccctgggggacaggatggggagacaggtctacccctcaaacccctaaccatccctctaggacaaactcacgtgtgcagccttcagggttgctggcgctcagcccccagtacccaggtttacagcgatcacagcttggcccttccacgtgagcccggcacatacagggagcctgtgtctgggagagagtaggactatgggaaagaaaagggccgaagcccctcacccacccttaccccatgcttggcatccacccagaatggaaataaaggaccagcagaagaacaaatgggccctgaggttgcctcagcaaacaagcagcagcagcagcaaaaaccagggtctctctgggcttcaggttttaggcgagctgggtctcctacctaatcctgcaccatgggcaagcctatgcttacctcaggaagggcaggattggctggggccagaccagcaggatgacaagagccagctatggaaagagaaccatgctttgatcattccttagtgacagggcttccccaaggtcaagggcaccccagtcccagacagaacgccaagtccctcctgtggttgtaaacaggtgtgaaaacacagacctccccatgcctgccaccaaggcaagggcacacatgtctccccaacccccatgctgccaagtggccacacagcacatggctacatacgtgaatacacacagacgatcactcccacacaatgaatgcatgtaacatgcacacagagcaatcacatgaatgattcacatgcatgaacattcacaaatctcggaacacaggcggcacatggaaacatcacatgtgaacacagcacatgaacacccttaaaaacacagagcacacagctacagaacacagtccttggatgcacacatgagctgacttccatgaacagtgcacagatcacacaaacaggaccaccctcctctgcaccaccctagctcaccttcacagtaggggaagttataggcgcctggtacacacatatcacaatgtagtcctgtcactcggggtcgacacctacactggccggttgtcgggtcacaggttgtatgcaaggagccatcggcagagcagtggcaggctgtgtgtgagagatcagtgggtgggcgcaaggtagggctacaaactgcacacctccatcctcccaagaaacttacggatgcagctggggaagccgtagaagccggggctacattcctgacaagtggcacctgtgtagccaggacggcagtggcacaaaccgcccactccacactgctgatccagggccccccgagggtcacaggcacaagctgtgggcacacaggcagggggtgggggtcagatcctggtcctgtggggatggcttaagtcctccttgctctaattctctgctcaccgtgacagtcgggatacccatggtatcctggaaggcatcggtcacagtgaggaccgtcaaagccaggtcggcactggcagcggccagcctcgtcacagccttcaggcaaggtccctgctgggctgcagccacacactgcagagtagaatgtgttactgggatcctgacaggagggagcgggctgtccctcgggcaccccagccacctgtgcccacatggagggatgccactcacgctgacagagagggaagtggaaatagccaagggcacagtggtcacacctgtccccctcaaagccggtgcggcacatgcactggccagactctgggtcacagaggctgttggctaccccagggctggaacactggcatgctgcaaagagagaaacaactggtgagtcagagcttacttcggtgcagggtcatctcacgggtggatgaggggaggcactcacggtggcagctaggcccgtggaatccaggagcacagagctcacagtgggcaccccggaagttgggtttgcagacacaccgtcccaaccttgggtccttccggcaggcattgccctgggtccctgcagcattgcaatcacagtctgggaggaaggtggggacaggaggcttagacgcaggcataggccaaccctcccgcctgaaagaccagcttttttacaaagtcacattttttacatattaacatagtacaaattaggacctaaaaaggagtaaaaaaaaaaaaactccccaagctggtactttaggaaaacagtgatgaactgcagattcaaaccacctatgtggctgggtgtggtggtgcaagcctttagtccctaacatgaggaataaaagctggtaagtatctatgagttcaaagtcagcctggtctacacagatagttccgagccagccaaggctatacagtgagaccctggtcttaaaacacacacacacacacacacacactctctctctctctcacatgcatgcactcacgcacactaccaccaccaccaccaccaacaacaacaacaacacagctattaattcgttttaacagaggctcctaattaacaaaagcacaaatacaggggaagactaagatgacaagccagacagaatcttttgtatttatcattatttctgggagttgggacgaaggaagaaagcccaccgggtgcccaaatcatgcagccaagagtactttaacatctgattgttgatcctgacaggaataatggcctgaggctggcggagaacattgcagtagctgagtaatcaggatacagacaggaagacatgtggcagtggacctctgggagcctgagcccagcctagtctacatagctagtcccagggtagccagggctatgcaagaaacccatctcaaaaaaaaaaaaaaaaaaaaagaaagaaaaaaaaaagaaaagaaaaagacagcaaactctcaaagctaccagtgaaggcacagcccaacaggaacacattttgttcctccagctagcaaagtccagaaaggaaaggttagctggaaaagaaggaaggacaagaggacagctgaggcccagattgatgtcaacaagggcagtcaggggtcaggctactgccccttccctccagtaccagtggaattgcagggaaactccaggagagaaagttcctagggctaaagaactgaagggcaaagaaggtgggtggataagtcaggaagaacgggctggaaggtgaagtctgcaggcattccaaaccagccagagataccacacacaaacactcagggccaggcgactgagaaacagcatccacttctgtcctgccctagaaggatatgatcctgccaacaagaaaaaccatctaaaaggtgcaaccccaacccagaaacactgagaaggggcctctgtctctgtgttagttaggagagaggtctccacttaagcagacagttgaggctactgtgcaggtcagcaatggtccagccagcagctatgcacacagtcagtgcaccaatactgttgtcttatgttagggagccgatttggcacctgggcaaaaggccacaacatatgcaagtctgctaagccagagactgctgacgtctgggaaacaccctgtggagacgagaccatgagaagtcgttcatgcccggatgtttgtcggatgcttgtcggagcatctctctgaaggagggcagggtggctgattaattcgatgttccatctgtctataacacagctgtggaaggtcatgtttacacaatagtggtagggaagacacaacccctaaacgacatatgtggttcactgcactgtttgtttataagaatgggcgcacacatggagttcagggtgcgtggagggggctatttgccttttgtgtttgctgaggtgctgacaatgaagcccagggctttgcaaaagccaggccaagtgctgcaccaccgctacagccccaagcagagcttctggaagggttttcatgggaagatacatctcagcagttaagagcactagctactcttgcaaaggaaggagattcaggacccggcccccatgtggtggctcggaactgtatctccaggaccagaccgatccaagaccctttctgcctctgtgagcaccaggcagacacacacacacaaacatacatacacatgaaataaaaattaactttaaaagttaacagactaaaggaaaggtgactaagataataactggccgcccatgcacagcttcgtcctgtgggtcccgatgacttcagggtacttactcacgatttgtccagcgggaagcacctgttctctcgtgtcattgtggggaaatgaaggcagagctgagggaggagacagcatacttgtccaccaggtctgtggagcaggctctctggctccagtaccacagaccacccaggggctctgggcgactccctgggtcttcttccacccttcctaggccctttgatcccgtcagactgtgaccctgggccttcccaaacagccccacccccaccccgagttccttgctggccctcacggtagcagtgtgggaagtccgtgtagccctcagcgcaggcagcacatagctctcctgtgaagttcggcctgcagtaacagcggcccgtcaagtcttcacaggtcccatccgtgaagtctgactcacagtcgcaggctgagagagcaagtcagggagaagagagtcataaaatagggagctatggtctggcctcctggggtgggagggggatccctaagactcgcagcctccaaggcttaggaacacagctctacttacgccgacagacatgaggtgagtcgagaggctggtcaggggcacggaagaagccaggcagacaacgctcacagttgatacccgtagtgtgatgctgaggatacagatacagagatcgctaagtcaaggcatgtccctattctcatcatacagccatctacaccgctggcctttgcctagcccacctggcaatccaggcagacacctccaccctggtacacgttgtcctggttctggctggcattgcgccgatccacctcagggtcgtagtaacagtcgtaggcatggccgtggcaattgcaggctgtggagtcagggccaacagttagcgcgccttccctggccctggaacccctgggacatattccgtgagccatgggtgcaggcagtgaatactactagtgtggcatacgcacactggcactcattggcgctgtccgtggtggcgggcttccacggctgctggttgaagcctggacagcatcggtcacaagagcctccacatgtattgtgctggcaggcacactgcagcctacgaagggatggagaggagtcaggacccacccctgcatcagagggctagagacgaggtgggtggtacgtccttggacatcgttggcctgctgtttgggcacaggctcccctccccacagttccccagctgtcatgcaataagctctggtccagacttccagttcccatcgcaatggctctgcacatggcttgagccttagagaatagggaagaaagggacagactccctatgtcaggggacagaggatctcaggtgtgtgttgatgttggggtggggcctaggcgctaaagcaggtggaaccttggctctctcaataccgcctacacccaagccttctaaggaaggaatacattagttacccagagacctggatcttattcagcttgtgaaatcctgtcagtcagacacccccatatatctagggcatttccccaggggctagtggccaagaactacttcctctttccaaaggccggaggcccgccgctgtcccagtgggcagggggacagctggctggagatgagcacaagactggagcatctgcgttgtataaaccaacacctcccacgttctaccagcgtgtggcagggtcacagccagcccgctcaaaggggcagcatacgcatttcctgagcaagaggccagaagcctatctgtgtgtgccaggaactcagagcctcacgccatcaagctcgactcccactgatccccattgggggtcccagggccttgggagtcaattctgcttcctgatccatctcgaaggcttctgggaaaacctcagcctcggtgtagaaggaaggaaggaactacctgtcagcctaacccagctgaggcagagctcaggtctaccatgggcagctcattttgagcgatctacgtggttaagaggcatccttgaagtaataagggaaggaaggagtcagtataaagtgcaaggctggccaatgggtaaaagtcctacaactctgccctgggggcttctcccttgggagacagagcccccaaggaggccttgcaaaggacacaagagcgtctacagatgccacacatgacagacttgggcccaactccatttaatgaagcaatctggtaaaatgctgtaaaagaatgttttggaatgactataaacaaaggaatctaaaaataggcggatgtgaaaaatgactagttagaacttctagaatcgaaagaatgcaattattaaattattaaaaaaaaaaaaaagccaagcccagtgtggtggggcatgcctttaatcttggcagttgggaggcagaggcaggtgaatctgtgaaaccaaggctaatcttgtatgtatagagaactccaggctagcctcatctacattgtgagccaaccagagccacatggagagactctgggaatagaacctggagctggagagctggctcagtggttagagcgctgctacttttccaaggccagggttggatttctagtacccgcatgggtctgacaccctcttccgtcctcctcaggtacaagggacacatgtgggacacatacatacgtgcaggcaaaacactcatacatataaaaatttagaaatgctttttaaaggaaaatgcaattaaggattttcaacaccgtaggtaaacaacagaatagacagagctaacaggggcattctctgaggggacattctccgaggggacattctctgagggaaggccgctgagaagacaaaaggaaaacacaaggtgttttcagacagggaccactgcaagagggcacagaagagagcaaggaagaccatggccacccaattaacaaagacacatgcattctgagatctcagaaccagagacatccccctccacacttccgactgatccacagggtacacaggcagaggtcataaaaacacagcagcaacgccaacatcaactcaaggaaccctggcccgacgaggacctaatgctgacccaggtaaagagctcctccaaaggtccgaaggcacagtcatcaaaagagaatcaaagccaacaatgccctagctcagcagccgtcttccaaaggtgactggcagacggtcacccactaagcggcacactgtggaaaatggaaagcggtccagtggaacaaggggccgtgagaacaggaaccgggaactagaaggtgacagagacgctggacagagacaagtgtcccaggtgggagggctgtggggctgaggaccaggtcatgtggggaggagccgggtatctctgaacatctgggtctgccggagccaggcaaacctgtgacagaatgcaggctgccaggccttgtgggacaccctgtcatcacagctgccctagaggctgagacagaaagtctgcccagggtacagtgagttcaagacaagcctgtgcacaacaaaaagcaagaaccctgggctggggctcactggtacagtgcttgcttagcatgcacaagacttagcttcttcatcagacgtagagccacggtatggccgggtgggggtaaggaccacactggatagacaggatgggggaaaggcggcaatgagacctcccctctctgctgcagtaacagacgacctcatctctaaggaggcagcaagtgaggaatgaaagaatgcattggctggtttgagagcacaggctggagctctgagataatattttgttgaagtctgtggctctggggaaaaatgccagcatacactattcctcaagccctgaaaggagggctgggctcagttcaggcctgaacatgtgaaactggcccagtggtgagcctctcccatcaggtaaggatggacccagatgctgggccccacttcctctaaggctaatttggtttactaatgggcctcatccattcctggccatagggagctgtactcccacttggcatttaatttcccagggcaatcagtggtgcctggagccgcactgccaaagactcatttccataagtgtccccagaaggctaggactgcagcctgcaggagacagcttcatcagtgtgtgtgtgtgtgtgtgtgtgtgtgtgtgtgtgtgtgtgtgcgcacgcgcgcgcacgagagcatgcatgctagctctcatcccagtatcttagcttcatcttcttcctctataacctggagcctgtaaggccccaggaaagaccctatactgagttcagctcaagacttaggaccaaaaactttgaggcaatgggggtggcaggtaagctgcttgcatcttgtaggagtgttctggggcacgctgaggggacaagggagggggctgcctggctgatgtactgggtaggacatgagtgtctcacatgggctacccactgccagctccgccctgcatctctatcccagccacctccagctctgccctgcggctctatcctcgcctgtccctgctttgttctgactcgtggctcctggaggtggagagtgatggatcctggctacctcctcagagcagctgtgcttatttatgcccacagggccttgtctgttagaagctcaatatttggctgctgctagtggggagggaagggaaaaagaggaaaggaggggcgatgccgagaacagcttccaggcagagtaagggctatggtgccaggctctggtcatccatttagataagggcttactggggtagtcaggccaccaaaggctctagatttgtgtggtggcatctggtggtgggtggagtagatactgggtgcttctgcctaatcagctggctctggatgggttatgggagcttggctgtcaggcccagggccaggctaaagcgctgattactcacaagaggttacatgagcactaggtacactaaatggggaacacttgctgctcctgtccttgaccttggcccttgccctgagtgtgaggaaagaaggaggaaggcaacagagagtctttgtgccctaaggaagtacataaagcggagctgggatgggctgcctggacatatgggacacatccacctggggatacaggtgtgtgccaagggatcatggctatcactgatgcccatcccaagggccctgagtccgtggcatcaggtaagccgccactcaagaccaggacaacctgagaggctcacatagttctacctcttcggaagggaaaacagaaactcggtgtagcagccagtgcaggtcccattgggaagtcagagctgtgatgggcaggtaggtagatgaggacagacagacagagagccacaggtctcacctgaaaggatccaatgggtccttggcgtcacagacatctgcgtggccatgacagacacagcgcccaccaatgctgatgtctttgatgctgtaataatactacagtggaagccatgagcattaggtgtcacctgaccatgccacctacaccaacccaccccctctcccccagagcttctacaagtctccagtcacacccacgtgctcaccctgcgggtgactgtggggtcccgcagcgccttgcccatgaggtggcccagtagcgtgttggttcgcagaaaccgcaagcggatgttggtggctttggtgaagtctcgaagtaacggtgagtaggagaagttcaaggccccagggcgcccatttaccaaggacaccacaatctgcagaaggtgtggtagatgaggccaggctcagaaacaacagggacccaccacccccagacaagcacagctgtgcaacccacctcgccattctccaaaggcactattcgcgagtattctgtggtgcagatgacgtcgtcgtcctgcgtgatgcgctctagagtccgaggtccaaaccgctccaaacaatccctcttggaggctgcaggaaacgggtaagaaggtagagtaacagatgccagatacagactcccatcctgggccccagcctagcatccttgtgttgcctacacactccgaaacacagattgctgccccacgttctactgaccagcaggggttatcaaacagacagcaaaaccctagctaggggctagagagatagctcagaggttaagataagcactggccgttcttccagaggtcttgagttcaattcttagcaaccacatggtggctcgcaaccatctataatgagatctggtgtcctcttctggtctgcaggcatatatgcagacagaatgctgtatacatataactcttttttaaaaaaataaataaatcttaaaacaaaaccctagctcaatgtagactggactgcagagcctttgctaccacgatgcccaggcctcttcctgggacatgccagagaatggtgttccttaacttctctgcaggcgcagtctgcagttgcccctctcttactcttggccagggagttttgggggacgtgtcaccaggcctatctaatcagagtacccccaccctgccaacaaaactggtcaggtggcatgtggccggctgggcctgccaaggactccagctgtctcctgccacaggcagtaaagctggcaggaggtaggcccacagctgccagagctgctttgtttccacgggagccgcctgagctcaagcctatctagaggagccataaaatggcccaaagattcctggtaccaccagtgtaacaccagctatgtccaaggtcaagcgtgggagtcgataagctcccatctacccctaggtggcgctggcagcaatgaaccctaaagaggccatcacaggggtcagggcttgcttggcatcaggggccttgaagcaactataggcctaccgcaaggactccagtcctgcagctaaggacactcacaggcaaagaactgccacggctgataagtgtgaccgaagtctgtggaccgctccagcacccagaggtcaggccgaggtgagttggcaaacttgatgagcacataggccacatggaacacctgcaggggacagggggtgtgacatcagacactgtgtccctccatgtagcttcctgcactcttaggtgtgaggtacagcaggcgacgcagaggcaggtctgtgacgaaatcttcaggtttgactctgaaatgtcttccccagcaggctcctgttttgaaagcttggtcccagctggtggcaccattttggggacacgtgggctattgtggggacatgtggaacccttaggaagtgaggcctaactgaaggaagtgggtcactaggagccttgaagacctagttcctatccaccatgacgcgacaggctttgacagcatgctcccgttgccatggactgaggtacatacctttaatcccagccctcgagaggcagaggctggaagatctaagtttgaggccaacctggtctacatagtaagttccaggacagccaggactattacaaagagaaacccccgtctcaggaaaaaaaaaaaaatctgataccaaagtagttaggttgctgctatcactaaagcacatggtccccatatgctttaaatcacatggcctccaaactctggaactggtgtgaaaggaatatggaagattgggaaatgtaggttataaaagtctagaagctgagctggagagatggctcagtggttaagagcacaggctgctcttccagaggtcctgagttcaattcccagcaaccacatggtgactcacaaccatctatatataatgagatcttgggccctcttctggcacgcaggtgtacatgcagatactcaaacattaaattttaaaatctttaaaaaagaaaaggagaagtctagaagctggaggtggagcttgctgggccattctgatgcaagcatgaacaccaggacctcagtagaaatacaggcaatggtgccaacaaggagatacctccctgcacaaagcatctctcacatgataacctgactcccatccccagagcccaacatgaagatggaaggaaaggaggctccacatgtgtaccacagcccacatgcacacacaaacacatacacacatgtacataaataaatacacataaaacatagtaaagcaaagtggacaggaggctggagaggcggctcaggcttaagaacacaagccgctcttccagagaacccagctttgattcctagcacccacgtggaagctcacaaatttgtaactccggtcctgggagtttcaagactctcttctggcaccaggcatgcatatgtggtacacagacatgaggtttcagattagaacagttatcccatagaaaatcagactggggtcattctgggaaggaatctgcccacattttgcctgtgcccagaaattgtgagagaagctaaattcaaaaggaatgaactaatgaatgctgtggggtaaaagtcaacatagcatccaggctgtgtcatggttattgctggctgccttcggtcagatttacaaccagaatcaggaagaaaaaaaacggagcaaagatgtagaggatgtaagtatagcggaaaggcagcttgtttaaatacaattaagagactagcaactttaattagaagttacataattagcacttggaaaataagaaaggtccctggaggccttcaatgcagtaaggtgactccatcaggttccacggtgaaaccgtcagctctcctgaaaagctgctgcccttggcagaaggctaactaggaacatggcctcacagtttcaggtatctgtagctgtgcacaaggggcccacctattgctcaggctggtgacagatagaaggtggcatcacctatatggtagcagatttgctggagtggagttatggtgtcacagaggcttctaacaagatttctgagaaaaagcccatcaggtttctaacagagtcaggttccaaacgaagcccaagctatagcaaggacctagccattggccaggtcaggaatttacaaaatctataaagaaatgctacaggcaccaagtggagtcaaccccagagaaactatgtagccaacagcaagccatttggacagggccacctgcatggcagagctcggactgccactgtatgccacaaatgttgagcatatagctacaggatttaatgtttgtcctttggctttgatcattctttccttttaggataggaatgtcagggttttgtttgtttgtttgtttttgttttttagagacagtatttctctatatagccctggctgtcctggaactcactctgtagaccaggctggccttgaactcagaaatccacctgcctctgcctcccaagtgctgggattaagggcatgcctggcacacagttttttggtttttggttttttaaaaagattttatgtatatgagtatactgtcactatcttcagatacaccagaagagggcatcagatcccattacagatggttgtgagccaccatgtggttgctgggaactgaactcaggatctttggaagagcagtcagtgctcttaaccgctgagccacctctccagccctgtgatgcacacttttaattgcagcacttgggaggcagaggcaggcagatctctgtgagtctaaggccaatttggcctacataatgagtttcaggacagccagggctatatagtgagaccttgtctcaaaaaaatagataggtaaataaattttaaaaaggaatgatactgttattttatactggaagtagcttctagttcttacagatgttaagagtctgccctgagtccagaggatactttgaactctggatttgtgaagtgttgggattgccacagcctggccagtcccagccttgagttctcagccatcacaggacaccttctcagcaaagcactctgatggactaacaaaccacctctgccctgaacatcccaagggccatcctctcttcacaggctcccgcccaccaccttcctcagcctacctcgctgcctagctctaccagctgtggtcccccctcacctgagggaccccaacttcactgtcaccacaggtatcaatcttatctctgccgacaggtgtacgcaaactaccccagcccaagggtaagatgaagcagagagttccttattcttctgtactgaatgctgcctgccagaaacgaagtccttgggataaaggtactgggtgcacaatttgcccgtttagctgcctgggactgggctgcagctcaatgctacgaaacttttcaagaatatatgaagccttggatttcatcccaagaaaaacacacacctcaacactcctcattcactcttggcctgcacctagaggtttcctatcacctgctatctacctgcatgcccagctcagcccacagagctggcaggccagcctcagacctctcttccttcctaaatgcttcagggagagcccaaaagcagcacaggtcttggagactggtgtgagatgaacaagaaaggggagaagccatcgtccaggctgggatctgttccaagcgctggaactaaggaggccagtggtgtgagcaggttagatccctcctgctagttgctgccccagcttctcaccaagagcaggtggaggtcagcaggcttaaagtgtgtaggaccccatggggaagggggaccctgtgggtaagggggacccctgctccaggctgtattagcttgctttctgtcactgcgatgaagcactgaccggaggcaggaactgaagcagagacagggaaagatgctgcttattttaagtggcttgcttccctcctggctttctcagctacctttcctaaataacccaggcccactgcctaagagtagcaccactcataatgggttaggctctcccttcaaccataagtcaggaaattgtcacacagacattcccacaggccagtctgagggaggtaattcaattgagattcccctctttctcgtctttttctacatctaagtttgcatcaacttgacaaataagccatcactattagaccataacccttcttttctgcttttttaaaaaaatttatttatcatgtatacagtgttctatctgtatatacacctgcaagccagaagagggcaccagatctcattacagatggttgtgagccaccttgtggctgctgggaactgatctcaggacttttggaagagctgccaacgctcttaacctctgagccatctaacctttcttttctaacctcattccatgactttttcaaccctagggaccccactgtagctgaggctgcaccttcaccagtggactctcctggcaacgacaagcctcagcttctgcccatgactccttcagttctgtagcttttatgacaccaaagccagtaccatgcaggagactctttttttattttatttttttatttatctattatatgtaagtacactgtagctgtcctcagacactccagaagagggagtcagatctcgttacggatggttgtgagccaccatgtggttgctgggatttgaactcctgacctttggaagagcagtcgggtgctcttacccactgagccatctcaccagccccacaggagactcttatacattaccaagtttagcttaaggaaaagccttgaggggctggagagatggctcaacagttaagggcactgactgcttgactgctctttgggaggctctaggttcaaatcccagcacccacatggcagctcacaaccgtctataactacaagatctgacgctctcatgtagacatacaaggaggcaaaacaccaatgcacataaaataaagacaaatacatttctaaaaagaccacgtttagataagaaagatagaaagagccttggcctctcggactgcagccgctgtgtgctggccctgagggagcgcttcccagacttcacctcagtgatgcggattgtttcctaaacgatcatggctgatttctcagctccaaccagtgagcatcaaatgtcccaggtaaggtggaattttcacatctgtggggctggtttcttgttaacttcagtcccagaggaccagaaccacagaagctcttcttgtagtttttggaaacatggtttctcagtgtagccctggctgtcctggaactcactctctcggtccatcagacagacctcgaactcacatagatccatctgcctccacctctgagtgctgggattaaaggcatacacctccacgccaggctaaaaccacagattcctaactcaaaataccacatgcatgactccagtagagtctgagagggactctcaagcttcctctgaaatctcacaaaccgggccttccactgtccacgccctcggcatccttatcttcaaaggcttcaccacacttcaataagtatgagcccaaaactccaaaattctcccccttcttcccacaaaataaagacacaaaaaacaacatgggtgaggtcagcccagcaatgccctctccctggtgccagcttctctcttagtctgctctctgtcactgtgcaaaaaaccaatagaaagcaacttggggaaaggattggcttcatcttacacggaaggaagccaaggcagaaaccaacactgcttcctagtttgctccccttggtccttcttaaataactcaggcccacctgcctaggaacaacaccacccctagtggtctgggcccttccacagcagtccattgccaagaaaatgccccacaggccaatctgaggggggcaattcttcagctgagaatccttctcatagctgagtggtggtacatgacttcaataccagcactcaggaggcagaggcaggtggatctgagttcactgccagcaaggtctacagagctagttccaggacagggaggactactcagagaagggggtgggggtggggtgacagacagacagagagacacagacagagacacagaaagatagagacagagacacagagtcatagacagagacaaacagacagacacacacacagggactgaccgactgcaggcaggcagtgcaccaggaccccagacacagtttgagcagcccttgctgagataaaggggtgggaccaagcacagccactctctcccagggtaggggcacaggcctattcacaggctgccagttctgaggtcattgtccacttccctaatggggtggggggagggcagggagatgccccacccagctggaggagggattctggcctcttcagggacaacttactttgcaccctgcctcatgccacagcctcttgtgccctgtggccccaaactgaaggtcaagcaggtccagcaggtctgggattgtataatgacagagggacccttgtgaagaagacaggccagggacagcaatagggacactggctgcccctgggagctggcagcctggccctcatgagtccctggggcccacccccgcctttccctgggcccggcccccggctgcacccttgctggaagctctggccttccccagtcagctggccctgcatttttcccagctgagagcacttttacaaacaccaattccaagctgctgatgggcagagtaagggcacatggaaacttctaagcccgggctgggatgggatgtacttagccacccacctctgtctacctgtcaggttaaacctgtcaactgtcctcaagggcttgctggccgcagacactggagggcaggaaggctatgccctcacacctctcatcggtctccaacctggtccctgctcccaggactacagcagtgcccgaggtatgacccgggaggggcacagacccctggcttcagcccctcccccgccacgcctgctcctctctgctgccaaggcagcctgacctttctgctgctgcacagctctttgcagagggaaaaaaatgtcttttaaagcaaaaagcaaacaaaagctggcggttatttttaaaattcttgctattttggggcaggcacgtctccagggcagcagccggggccaggctcttggcccaccatacccctttacccctgtccagccagatctcacagggccaagactccaaaggaggggttgtgcccataaccctgcctgacagggctggcaagcatcccatgagccaagctggccatccccagtgggaatacagggcaggctccaggttcaagggaccatgtggccctatgaagccatttctgcaccttagggagagggaaaggtacacggagaagcatccaacattaaaactccatgatatgaagaatccaggaccccaatgagaagatggacttgtctcctgggtggacagaggtggagccaaagtcgccaaccctagaaccacctggcacaagagtggaaggaaggccaaggaaaaagccagctggcagttaagaacattgactactcttttaaaggtcccaggttcaaatcccagcacccacacggcagctcacatctgtctgtggctccaagatctgacaccttcacacagacacacatgcaggcaaaacaccaatgcacataaagtgaaaaaggcaagtgggtttggacatcacacatgtgagggtgagaggagaactggtgggggcctcccaggccctgcgatgtaggcacacacaaggtaaacctcctggcaggcaacatcctaaaggcagataccacttcactaagagggaggctacaaccggtgcctccagggaaggagcagcaatctgccctgagtttacagcctagttctcccctggccccagggtctagggagccccaggctgggtgtaggtggctgtgacctatcctgggctgaggggaccaacccacagttctagtggagtgactcagcgggtggcctgtgactcagcctggaccctgcaggaagaaggcccattgccaattcccggggacaggccagggtcccaagcggtgctgggcggaggcaggaagcccttcctagccctaggcatccggctaatgccctgaccactcccttcagatcaagctagggcacctggaccttctgagccctctaagaccttgaggagtccagtccagccctcagtctctgtctttctccaccatgatcacctagaaatctgctgccaccagacgaagctgcattggcacagccatgatagggtcttctcaggctaacagctgggttaaaaaggcagagctatcccttcaacagaccagggagtccagaaacaggcactgtgtggactccaccccaagagttgggggaatggaaaagccctgggaggcaccaagcaagcccaccactcaaaatcaggaataaaaacaaataaaatggaacctgggtgccacttagtgatggggtgtttgcttactggcatgggagggcctgggaagactgcaagagtcaaataatacagtaagagcaagggatggaggttggggtggtagctcatgcctgtaatcttagcacccaggaggtcgagaggcaaagggttcaaggtcatccttggctacttaacatgttcaaggccagcctgggctacttaacaggtccagcctgggctacgagatgctatctaataaaaattacaaaaaaataaaaactgtggtacacaccaagaacagatagctgcctggggccacaggtgtgttgtaagcccagcagagagaacgggcagaggggacggcaggttgtcaactggggggggggggcagctaagcagataccaaacagcccttaacaccccagctggcctgagctctcagcccctcctgcctgtgtggatcagcctggtcaggccagaaggtcagagtggggcagaggaagtagagttgatcccaaggggaccccccacggctgaaacccaaacagtttagtctccactgagaggcactgtgagctcagagaggccagcacagtggagtttgtttaaaaccacagaaaacaggaaggctttgggggcttccagggcatggggggggggggaacgggggtcagagagggtgacttaggagtgtgcatcgttctactcagagtgtgaagggaccactgcgagagagacagcagtatgtggctactgagagccagtgtggcagcaaaggagcagcgagagtatccaaagccctgggttgggtcctcttctgatcaggggggagtgagaagggggaaggggtgggtaggaggaggccacagagggcaaaggggagaggagaagtaggggagggagttgacagaggagacctaaagggaggcagaaggggttgggggagaagaagataagatggagaggtatgcacgcagtgtgagcatgaagcaagcagtaagggaaggaaggtggctccaacccagggttggtctgagaacctgcctgcacagacccctactctaccctacccctgcgagtccagctcaaggagtcagactggcacaaccctgcacctgtcctggccactggactctgtaacttgtaacttaagcctggccatgactacacttcctgccacttccctggacaacccaagcggtctcaggacattggccacatggctgtgtgcccagccaggcccagggagccatgccagaagcttcagcttcatgaccactagcaagtggcccgagacctatccatagagccccaaccggagggaagcaagacagggcgagcctgcaggacacctgacggtcgatgtgccacctcgcatgcacttcattgtcccagtctcagagaagacgatgtggggcagggggcaagatccaggtcataaagccatccctggggcacaggcccctcgtcctagccttaaccagctttaactggctcagccctcatcctaagtgccctcactgtccctgtctagaccacccccttccttgccctcagcctggcacctccaatgtgtcctgcagttcaaggcctttggggctgggacccgtgtagcgtgtacactagaaggaagaaaagaagaccctatattaggaaggagactaacactcctcacctctttgagctgacctgggaaagggagcagatgctacaggcgaagaggaaccatagctgataaccccggtgcagtcaggtttcaagggggacaatggaggaagaggacatgggccaactcatccctgcctgctggggggttgccatgaggcctgagcctggttccctggcacagggtcggactctggagagaacaacctgactgctgggccccagaaacttccagataaacacaaggagataaaagagtccctctcaacccttggcaaatcaggctgggtttcaggaaacttcctttgtcctcagctgaaacctcttccaggggaccctccctgacagaaagactcctcttttaagctccagtaagtgcccagtctctcctaggtgttctagatgctcccagacaggtgtggtggggaccagcccttccaaggtcagtgccagctttggactcacacaccagggcataagatccagggcagtctagcagcccaagcccgccctccccagcctgtaaggctccctgccagccacccccacccccttcccagggcatccgctttcaccagaacaaaggcgcctgaccaggcgcttcctgatgcttcctgaaggagccaaagcccagggctagcgccttagaggacctcccaggcctgcagcacagaacccaggaagaacttcctcatgaaatgctggagtcagtctgcctgccccaatcccagagcttcctgcccctgccatggctgctagtcattgggctagctgtgacaggagctatagtggacagagagagaagtgactggtggtgggctcttctcagaggtggatggaaaggctgtccttcccctgcctcatggtaaaactgagactcaaagagacaagacgctcatgcatgaagcgctctcctagcttggaaaaacccaaggcccaaggaggagatgtgaggatggttctgggccctggaggtacagagtccacactttgtcaggaagacactttgtcaggaaggcagtccaccactgttccccctcccacacaacacttgggcatagtgcccacctgctctgtaggcaatctgaagttgccatggagatagggccccctctcctcagcgctaccccaactcttgcttcctaaggtgcagccaagcaagacagggaaggagagcacgggtacccacttgttacccacaccgacggacaattcaacacgcgccctcccatgggagtcccacttctgtaccaaagaagaaagtggcttaaggttcaagtggttcgtgagaacccctaagctccggggtacaggaattcagagatggaaagctgggagatcgagaccaaaccagaccaaacgaccccagggcagtggcctcctccctttccccttcctctctacaatggctgccggagcacagttgtggattggaacacagttgtggatcggttcccctgaagttcaagaccacttgctgagatccagcctgctctccagctggctgcctgtcctcaggctaccaggtgggaagcagataccttcctcaaaggcctgcccttgcaggcctttgcctggctgtggagaccttactctgcctcacctctcatcccctcccacctcaggtggcagaaggcacacaggtccaggaaggagcagaggccagctgcgttgtggtataggcatggagacacaagtctctgaactggcagaatcgtgtgtaggatcaaccagccccagcccagcttcatctacacacctcactctggtcccagggagcctcaacgtgtccaccattcccacaagccaggatcccagtggactaagacacagctacatgagtgtggcccagtcctggagtgacaccagagtccccagaccctgttcacctttgggtggcttgcctatcatggagaaacagcctgatctaccctcctgcctgaaccggagcctggagggcctatgagggttcagagctggcagtgtgggttcagtcactgatcccctgacctaaaggtggtcaccgaagcacaggtatctcaggaatgttcatttctaccgggcttcctccacattcctgcgccccgcccatctccaccaagaattcctcagagtaaacacaccagggagcctctgagggcacaggggccccaagcaggtctgctacacctccgtgtggcgtgtggtcagcacttggccctaccaacaccggtgtggcacctgggggtgtcccattcactccccactttgcccatatacatccggggatactgaagaacaaagatggccactgttggcttacaggcaattccgctagactcctcccaaggacctagcaacggcttatggcagacattatctgccaccaggtgtgagtggtacaccaggcggcatataaaaggactgcttgctaccccaccctcttttctctctattcccttgtgttcccagctggtctctctttctttccccctgtctttctttctgtctttttctgacctcctttctctgctttcatggctctgcttccgtctgtctacctctacaaggttctcattccgctccttcaaataaatctccctttttttgtttttttgtttttcaagacagggtttctctgtatagccctggctgtcctggaacttactttgtagaccaggctggccttaaactcagaaatccgcctgcctctgcctcccaagtgctgggattaaaggcgtgtgccaccaccacccggctcaaataaacctcccttatatcaggtctgtctcatggcgcgaattcttgggggacaccttgatatgggcccatcaggtaccctctccccaccccggcagccacattatacattataacatccacccacaggcctttgcctgtgctggccctgctcccagcagccctgccggccatgggctttgtctcccaggatggtgacctcaccaaaaatgaaccctacctggcccaggtccagtgtgacgttgacctcattgtactccaggccacgggacaggggtgggctctgccaccagcgctccgtgccatcgatggcgttgctcacagggtgtgccttgttgctgttggcagctgtacagatgtcacagtactggccctgcagggagaagatgaccagatgaccaagaaaggctaagcaccccctttctccccgagagccaccatcttgccatatgaacctttggtcccaaaacaccgttctctgttctcaactttcagctcctcatctttcagtcagtcaagaggtatggctcacactacagaagcggcatctgaggggacacgggctttaggtgagaaaaatcaaggcgagcctcgatgggaaggcagcttcaagaggctctgggcagagagctggctactggaaaggctctaggattgatgcagccaaagagcaaagaaggcaaaagcaggtaagatcgccccacccctcccacctaccactctccttggtggtcatcctaccaccagggacttggtagtagggatgagaaatgggttgatagtatagtatgggaaggggagggagttaacaacatgggattgggggatggggttgatagtatgggataggagaaagaggttggtagtaggggaggaaatggggttaacagtatgggattggagggatgggttgatagtagggatgagggagggggatggagaggttgatactataggggcaggaatgaaagagtaagaaaggtagagctgttaggaagaaggatcgactggagaagagggttcatgagggaaacagatgtccccagctcccagtctgtgcctggagacacacccagcagtctagtacttcctagattgggtctccagagataagaattaagcaggttttgaggatgggagggggtgggatgctgctagaatgtaaatattcctgccaagtggcagtggcagcagagcctgggactcccagccgccatttctgccctatgggacaaagccacaagtcaaggtgccctgggaccctcagtgtccccatctgcagggcagggatagggttgtgctgctgaagatgtcaccgccaggatcacacacagggcctggcagctgcttcagtcacaacctagccacctgctggagcctgtaggaagtcacagcctagccctgggtggctgttcctggtgggggaggggcggggccatggatcccagccaggagagcccccgccccctatactccagggaaaccaaacctgtcctacacaaagactgcactggagacgtgacaggactgcggcccagaatgtgaccctacccctcccagactgagggtacagaacagaacttctttctgaagaggttggggtgtggagaaccctggccccgattgggaggtctcagtggcaacagagcctccagtccccacgtacacacagtaggctttgcctccctggaagtccagctagctccagatttccaccttatgcatccattcctagggttgtttgtggctccccaaaccccatgtgttgacctctggggaactcctgccaggcagcctgtatagagagagcacggtgctctcttgatcttggtttagatatcatcccctgggcattgtcctggaccaccccagctgacttgcaccctgccaggcactgtctgttatgtttatcccatcatacaaactatctggctagttctcctgccccccacccccagctctttggtgttagataacaccttccttgctccaccacccccaggctgtggctcagaggggctaggacaatcataaccctaaatgagccagtctgtcagtcctaaatgatgatccccaacctgcaacctgtgtgtccccagctctcagagccatgggacggagcagagcagaggaggaccctgccccatgggtgccaagcagggtggggtgggcatgcctcctagggaggcttcttgtggtccagaccgtgaggaacatgatcatactgccccaggagtcaggcccaggctcagggatacaaggtgggcacctgggagtccaggagtccagggaagtcagtgtgtgcctccttcgagccaacagagaggggctggagagttgggaaaccacagtgagactctccaatcagctcttcactgagcagtaagccacaagcacccttggtggtctggatttcccctactgacctctggctcacagcagacagggctgggaaactaggcttcctccaccccctggcacagagggtcctgccaggaacagaactaggaaacataggagctgattaggactttcccttccactgagtcatgctctatgtgaggccagcagagttgtgatgcccatggggagggcaggagaaccaagccactctccatcttgcccagaggccctgtaggactctcgggctcctatccgggataaccagtccctcttttgttgccataaagggtccctgactccttggggacaatctgtgactctcatgcctaaccccttgattcagccattgctgaagcagctgcaatttctactttctcaccaaggaggtgcagcagagaggggctgtaacttctgaccacctggctggacctttgccactataaagaggtaataacaatttgtgcagaatcagatccatctgagccagtgaccctccgagaaggcctgtgcactagcagagcaggatcggtggtccaggaccaggatgtgcaaaaggagttgagttcccttcccagagaataacaattactatgtaagcagagataaaggccctgggatcccaggcagtccctctgggtcaggacagatccctacagggccccctcctgagactcagctccctgaagccatatactgagcaacgctggccaagagacacctcacttctgttttttttgtttgtttgttttttgttttttcgagacagagtttctctgtgtagccctggctgtcctggaactcactctgtagaccaggctggcctcgaacccagaaatccacctgcctctgccaccggtcccctcctgcctaggtgctgggattaaaggcctgcgccaccaccgtttgatggcacctcacttctgaacgctcgcctcagacggatcctgctctgacttgtaaagcttcaaaaacaagtgtttataccttcccaggcctcagtttccctgtctctgatggcccacacctgctcttactctgagactgcaagggaaccagagcgcagggagcccggcccttctcaactccccctccccacttggaggcccgagaacaggcggggtgggcaggcaaggagggtggtggccaggtaaaccagaaaacagaactgaattccttcaccgctcccctttctccaccccgacgaatccgttttttcagctattctttccctcgccagcctccttccaggaacgtggaagcaggtccctagagaaggtagctaaagttaccaggccctaatggctcccaactccttaggtccctaacgtgaggcaggagtcctgcggggggggggggggggacaacgtggcccacctgcaggctcagcctgaaaggcagggctcaggagagtccttaggtacagaatccacatctcccgggagactaaagccccagagcctaccacctgctgggcagggggctcctccacgatggcccacaggtgttagcgctctccacctccttctgaagttcccagatcccaagcaaagaagcttcttcaacttttggctgagacagtgagacccaacaccaggagaaaccggcgatggtgcggcttccgcgctcattccgtccctatccgggaggccaacaggttcctgcctgtcccggggtaacaaggagctcccgccccctcctcacagtcagcgggcaccctggccaagttccgcccacgcagggatcccggacttacggctgccgaggactgatcaccggtcccctcctgcctaggtcacccccccacccccacccccgagcttcaccagccccaggggcccttggtccgcgagtcggacacttcattggctcttccagaggcacgtgccgtgtctgcacgagtttcggtagccgcatcagggtcccccttagtccatcaaaacatggggccagggagtcttggtgggagagtcagtccgtacttactctccccagcactgggagcccctacgagatgtctgggttccggcgctagaggtggaccaccacaggatggtgtaaccagctcctccgtgccgcgctcacctggattgtctgattgggatctccgccagccaccggacccccaaccagcttgcagtagaggtcctcggtggggcgtgagacactgcgcgtcggggcctcctcgccgcaggtcgcggacgcggtgatgcgagcgccctccgccaggttgaagtagggcgggtgcaggctgaagccatcgcccccgggagtgcgcgcctcgcctaccagcgccagtccagccagcagcagtagcagcggccgtggcgcggggctccgggggccaagagcgcccggtgcgctccccgcgcagagctgccctccgcgcttcgccattttcctgctgggggctgcggctctagggacagcgcgcaccgcaggagcccggcaagtctagtttggggcggccggtcccgctggccccgcctgtccgaggacgtcaggccccgcccaggcccgcctggcgcccgagccttatgccctggagagggggttgggggagggcataagagagggggcggcctggggaccttaacccttccgaccccggccagaccagcgtcctggaaggggcacctgctggccgcccgccaggccgcgggaacttggcgctactgagcctttcctctctcccaggtggtggcttcgatccccactgagaccccttgctttttccgtggatgttcaggaccccagcatgccgggcctgcctctacccgcccagcggctcctgtttttgtttccctaacttcaaacaggtctcagccacctggcgcctccccgttgccctagcctgttactctcttccttccctgttggtatttgaataaactgtgtgtagctgtggatggggacccagaggagatgtgatctgcaaatggtggggggggggggggtggagaagaccagacaggaggagaccccctacttcctccattgttaggtcggatttagccctgtctacccctttgggttttaaactcctctgcaataggggatcaatacaagagcaaagaaatgacaggcgcccacccatggagcatatccaaggatgctcattggcctataggtgccactccataggctccttgggaagctaagactttgcttagacatctttctttctttctttctttctttctttctttctttctgtttttttgtttgtttgtttgttttttgtttttgttttttcgagacagggtttctctgtactgtatagccctggctgtcctggaactcactttgtagaccaggctggcctcgaactcagaaatccacctgcctctgcctcccaagtgctgggattaaaggcgctggccaccgccgcccggcttagacatcttttaagcaagccgtgcctctagctcctgtgtttctggggtacagtgggctccagttgatctgcctggctgagttgcaaacattgaacgtcctagaggcttagctaagatgcttgtgtacctcatgtctgcttcagccacagccactggattcccttcccttggattctaggaccaaacaggaaagcccccaggggtgtagaggtcgaactcagcagcagggctagcagctccccttatctcctagccaggccaccatctcacgtttttgggtaggactcccattcttgctggtccttctggataatcccaagggtcccagtgagttcctgaaacactgccatcatgtcctggcccagttctgacccgtaattgtctggaaaatttgcaccatcctcctgccctcctgactaaccccccagcctcctacaaatcttaaaccccaaggggctgggaggaccccagtctccgttgaaaatgcgaggtcaagacaagctgccctccctggatgcttccactttccctccccggaattcctctataacctcactattagttttccacctgggggagggcaaggcagccgcttccctttgcttcgaaggcttggtgtgggggaggggctggctccagagagggcgggagacagggaggaatctggaattcagtagagtaggctcagacgctgatttaagaccccgtgtgaggcacagctggggcagtagcaggttcccagatggctggccccaccctactactgcctagaagtcccccatgcccgccaggaagccattctcgttcacgcctctaccctctttagcagctgggggtcctaacagcctgaggctgagagatacattaccaaagcgtctgacctccgggcttgatagcctgctgacttcaagggagtttctccggggtctagagggcaaaggttgtgccagtactcccctgagccccctagtggccaggcaggatgtactttggattggtcccagaggagccagtgaaagagagggggcagatggctgagaacgtgccgagtcagcctgtcagccagcaccgggagggttaaacccaagctagctacttcccagcagacagctggcccaagaacaactggtggtggacggggcggctgatgccggcagaggactctgtggcacgggactggtgaagtgtccacacactaccctgtggcagctggtctgcctgggccaggagggagcagctggatctgaagctagggaatggagcaaaaggagatatcccacgagggtggggtactctgcccactccatctctgtacccatcccctgacaatccagacaacatcagagggccctgtccttgggagagggtgcctagtctaaaatgaagtaaggagtaagctggcccagagagggacgtatgtcaggagcggtcatcaccaaggtccaggctcagaggaaggcagagaggtcagctgcagcttgttgggggaagaagtctggcatggttctattccaacagcattccagggctacacgtcagcccctaagccacccaacctcgggggcagttgttggaaacaaaaccaacgtgagctgtccctctcagccctagaagcccaccttggggctgcccagaggacaagaggataactcttgctcacactcaagggtgtcactaggcgtcacaagcaacagtagacaggcccccagacccagacttcaggtggctgccacaccctcctagagagctagctctaactacctcttgcttagacaagccaggaagagggtccatttccaaggcccaggatgtgtggaagccacattcccgttctcgaggctgcgctgaggccctttcagagagctgatggtagaacctctggccctgcccatggaagggagccaggagccagtggcaagactgattctggcagctgctgtcagcaagatccagctctgtcctccaaagattcagactggacagatgccaaagggagtcacagccctgagaagctgacatcaggatgtcgtaaacccaaaggacagcgtctggcctctgctggtcactgactggcagagtagcacatcgtgtccctccatcagcactgtctttaagacagagctgggaagcttagtaagagggaggtccccaggcgtggcaccctgagacccctcccccagtcttggagaaccctgttgcaaggctagctatctgatctaacttcccaaaagtctcctggttcccgtacccataaggatggggctgggggctgctagacatctctggtctgagagggggcctagaaactagtaacgacttgtcccttcatgagttctttagaaccgtcaggcccaggcaccatgaagacatatgtaaacctacatacagtatactgcctcatttccacacgaggaacctaagagtccaagcagatccatcacctctgtaggcaatgaactccctgcccagagccctctgtaaccactgcaggcctgacccaaggtagtcactgcccatgggtggaggcctgatgggaggtggaggtgggagtgattactcaggggactgagtaatagtgggccaggtccccaggttttacacagggctcctcaaggtttctctcactacccagcttctcttctccgtgggaggatgaaggtgtaactttagctggatgccctgcagagaagggcaagcttatagcaggtacccaacctaggaaggtctccacaaagttgttaatatgatgttcaagaattcacagtccagggactggagagatggctcagcaggtaagagcactgactgttcttccgaaggtcctgagttcaaatcccagctaccacatggtggctcacaactacctgtaatgagatctgacgccctcttctggtgtgtctgaagacagctacagtgtaacagtgtacttatttatagtaataaataaatctttgggccggagtgagcggggctgactggagtgagcagaggtcctaaattcaattcccaacaaccacatgaaggctcacaaccatctgtacagctataatgtgctcatgtacatcagggttacacagggaaaccctgtctcaaaaacaaaacaaacaaaaaaagaattcagggtccagttttgaggtttcctaaccttggtgagtttatctgagttgggggggggggcatcagcagataggatgaggtatccagagcccagggagtaatggttcaggtcctggggttcccctgcttcaagccctggcagttcttagaggaagatctgagctcccaaagagacccctcatactacaccacgtagtttccccgtagatctagccacttcccagactggggtagggggtggggtgtctcaggaactggaacaaaggcctcccagaagtatccttgccagagtatagacacacctctacctgccagcttacatgcaagaggcccagccctttgcctgagagacaagccaggtccttcaaggcccaccagcttcctgggaagagatagacaataggcctaggaaaaaaaaggggcctgtcctttcatggtgagtctgcccctagggaactaccaggtagagaaagcaccaaggaatctcctggcacctggctaagataaaagatgcaggatctattgccttccctgccctatccacaccacttcctagatagcaccctgtgaagcctgaggctcaaacccatacggagagggcaagagagacacaatggaaaagtagtggcatctggagatgctgtgctcagccccaaagctgtcctgtgcttgcccccagtaccaatgctccaacaggctcctccctgtcctgcctggtcaaactggctcccatggggtaggtgggggtgagggcctgagagaagtgcccacaggcggccttatatggccaggaggcttatgctcaggaggaatgctctcctgagggcagagcctgactccagcaggggcaaggcttcctgagctgtcaggacgcttcccacggaccctggtgtcctggcagtagcccagcaggggagccacccaacaggacttgggaggatggggtcctcaaattcaaactgtgccagattttctgcactggcaaaaacacaactggagggcagcctaccccgtctcacacccatcagacaattctttgcctgggcccagcagcctctgctctttgccaagagcagcccctctgcccacctgctccctccacctctcctaaccctcctcactcacgtctctctgactctctgggttgctttctcaggctgctttctgcctctctctgtctctacttccatctttgtctatttctctgtctctattacagtttctgtttctctctgtttttgtttctttgtctccatgtatctgtttgtctctctctccatctctctccaaccccctgaccagtgctgccctagacctgccaaactcagcagcagggtctggtgtggccttggaagggctgggttgggcaatgggacagttgcaagacacaaacaccctgggccctgaagctgacaggccttagttctgtagctgccatagggctgaccttctagaatcttttcaggcctacaagtgcacctgccctgccctcaggtctccacacttcaggggctggtcatgccaggacaccaagatcttgcctcacactggcacagatggatctaagcctgattcttattcacagtgatcatgggacattgcattatcagttaggtggccccagaccttctttcaccactgacgtgctgtgctgcctcagctcagggaggacagtgagctgcccctgggagtttgcggtgctgctgtatgtctcctgtggtccctaagaagcctttagcacagtttgtaggaactaataccaacatcagtgggaagcaagtaacagcctgaggtgtgagagccattagaagtggcaatgtgaaccggggctcacaaagtctgaactgacaatcagggagcctgcatgggtctgacctaggtcctctgcatatatgttaaggttgtgtagcttggtgttcttgtgggactcttaacagtgggagtaggggtgctgtctctgtctcttttgcctgattttgggaccctttcctcctactgggttgctttgtttagtcttagtgtgaggtgatgtgcctggtattattgaaacttgatacgccatgtttgattgccatctctaggaaacctgcccttttctgaagagaaacagagaaggggtggatctagggaagaggggaggtggaggagggactgggaagagaggaaggagggaaaactgtggtcaggatggaatatataaggagaataaatttaaaaagaaaaaaaataaattaaaaaagaagtgactagccgggcagtggtggttcacgcctttaatcccagcacttgggaggcagaggcagagacaggcagagtgagttccaggacagccagggctacacagagaaaccctgtctcgaaaaaacaaaaagaagaaggaggaggaggaggaggaggaggaggaggaggaggaggaggcaaagaagaagaagaagaagaagaagaagaagaggaggaggaggaggaggaggagggagaggaggagggagggggaggaggaggagggagaggaggaggagggagaggaggagggagggggaggagggggaggaggagactgtgcctggtggcagcagtgcacgcctttacctggtctacagagtgtacagagtgcattttagtatagccagggctcacatggcgttgaggcacacatcggggctgagggggcaggtgtgaccaccattatacaaaatccagatcagtttgaggccctgacatagactggaaaacacagccaaactctgactcttgcctgggtggcaagctcctccgcaagggcatagtgtgtctgataagggtctcctgacttaaagggcggcagcactttagaagacttgctgtgcaaggttagcaggctgagaccactggccacagtggctgagtcatgggtgtatccaagaagaatgcggaggcttttcttgttaataaacactttatatatctacattaaaaatccaaaccgtaacaagagagaacagatgactctggttcactcagccctgcacacaggagccccgtgaggccggatgggtctgtgagcctcagcacacagatcagactggccacatgacctgtccattccactgtctctctcacgctgacctggaggccagcccctccctcctgtgcagggcctggagtctctaagatggagacagagcaagctggtgaaggacttgatgctcacacgacatcttcatcgtggccacctgaggcctacagggatggtcttcactctatggcccctgagtgaaccacgggagtgataaggaggggcacacacagctgaggagcaatgatgtcgacagactggtgacagtgctagaattaaacatagtcacacttgaccctgtggggactaccagacaacctgtgagtcacaggatgctctgtacttatgtctacagcagcagcagcaatccccactgctgagaggaggagaggacccaatggctgtcagccatgaccaacacaggagagtggctcctgcagtctgagagaaagacttgcacttccacctacttgccttccagaccttgaagcctggctctttaaagaggccgcccagagttagaggtggacagctcaggacatgctgtggccatggccctcctgatttcaacatgaagctcaattatgcaagatcaaagattggatctagtcttggaggcaactggggaccctggaggcagggtgggtgcctgaggcctaacaggctgctggtaaaagcagggccacatcctggcaactgtgaccacacagacttctgacagcagctgggccctgtcaacccacactaggaggcctgtatccatgtttaggtttgcagtgagcccagggcatctgaccctcaagtgggcacggcctgaagagacaccacgggatccccaggagctaggggtcctccctgacttgacttcagttgggccaccaacccagcctcctgtggagactagaatccagatggaaggacacccatcccatcccatctcatacacaggggcctggcacatgtcttcttggggtctgtagcagctaaaactacaaagtgatacccagatactgttattgacatttttaaaaaaaagattgattcattcattcattcattcattttatgtgtttgagtacactgtagctgtctcagacacaccagaagagagtatcaattcccattacagatggttgtgagccaccatgtggttgctgggaattgaactcaggacctctggaagagtagtcagtgctcttaaccgctgagccatctctccagcccctgtcattgactgttgtcccacttatttagtaaaagcttggggaaatccggtgtgggcagaaactttagaaagaacttggggtgtccagctcaggcagggagacgttaccacagctggatcctacaggccatctctggccaggctgagtagccctcagttcaggccaggctatctgggaacatgggttagcctgtgaggaggtcacacctggaaacgtagctatccccttacttgtgtggaacggggagagctaagatggaggctctgccccagctctgtttgccccaagtttcaacattagcaaaaatatttgtcctatgactcttgtgtggaaatacatttccagggaatgtaaacacatggagaccgagaggctcccgctggctgagggtgtgcgggcggatgggtgggggcgtcccactgtaaacgcaggattattctttccaggggtctgtatgtcccagctgagggactgctcctgtcctctgagggcttcctctcagctgagggggggggggggtagggagaaccactgtgaggtctcctagttgatcctaactctactacgccttgctgtgctatcgggctaacatggccgcccctgggacctttggacacagtgatggactgtgttccacctttgtctccatctgtcttgggccctctggcctagtccctgagccacctctgtgcatggagccaggggccacttactagcctcagcagggttgcattcggtccaatgggacactgtcacctggagtaagctgctctaaaacccgtttcacagagaacagaccacagcggagagaccatttatggactgctgcagatggccatgtgaccccagacaccagtgactctgttctccccacccaccccaacttccgctccaccctgcgcaccaggttggaaaaggtctgacctagtagcttggcctctttccagtcctttaggcagggcggggacccctgctgtcctcagcaaagctcagcccagctccactgagctgagtctgggaggaggttatctgggtccctcctgatgctggagcaggctgtgggcccctgtctccaccaggaatgcacagagctcccgcccctgcccacccaggtggaggaatgcagtgggcctctttctggaattcccccaggcctggcaccactggcagctgagctctgtctctgcacaatggcaccagcgctctcaggtctgctggcttggaaaacgggagtcctctgctctaagagtgcttccctagcaagccagcatgtagctcctctttggaaccacagctctttaaaaccccaccaccacccactgctgggctatgactttaactcagcggttctcgatctgtgggttgaaacccctttggggccgcaaatcagatatcagatgtttacattacaatcataacagtagcaaagttacagttatgaagtagcaattgtgtggttgggctcaccacggcatgaggaactgcattagagggtcccagcattagggagtttgggaacgaaccatagctttaactcaatagtaactgttgactcctaattcagggtacccagagttccaaccccagcaccaccaaaataaaaccaaaacctgtccagtaaactttgttaactgatagggctggttatagatccatagtttgtgttctatgccctgtggctccgagcagccaccatggcctctacacaagagccctttacttgccccaagttgtgactccacgttgccacttgtcctgtggggaacctctgtgactctcctgccctgcccctcacaggcctgaacaaacagatactgttgcgtactggtggaatgaacaacccacagagtagtggaaactatggctcaggtgtcccctggaactggagctagggatggtggccagacagcagggtctacacagaatcccggccagggagatggtgagataggagtgggtctgcaggctcaagtcaaactcaacccagcttcttggccaggcttagggcagggcaggtcagggaattgctatccaatctttattatacagtgaagaacagtgtccagtggctctgtggccatgaggttctcacaaagggagtagacaaagtccctacaggggccagcagcccagggagaagcataaggtgatggagaccccaagcaagggggttcccagatagatgcctttatggaccaggttctggctgcagctgcacagccaggttgtaccgcagaagtagagctgaagtacctgccatccctgctgcaggcagcctcaggagggcacagcacaggagagtttcaaaccttccttcaggaccttgactctctgggagtttttccttgagttctgagaacattccagagggacctataaagttggtggaagaaagaaaagcctccaggaaatatggcatcaggctcagagaggcaagcccaggcaactcacctgggcaggaatttggattctgtccctttccatcagccaaccttagccttggggcttgttttgacagccaccaacacacccagatggcagttcctctttgatagactgaagccctggagaggtgggtgcggttcctctgcagtccacccaggctccctagctgggaacctcttctcatctggaaggtgaagttccccggattctgaatccccccccccccccccccccccgttaacactgctgtaggctaagcagtgcctgggccctcagtttcctagcttctgactctgaaggaatgacttccacttagcctcattttattttcctgatctgtacaatgggatctgcctgatactttctctggtgtgctaggaaagaatattctcagggtgatacagtgtcacatggagagaaagtaaggtgccttttgagataagggtgtgctgtgccactagccaatcccggctggcaagctcactggggctgggagttcacttcgactttaaggtgggtggtgactatggctcattttatgggtttgacctcacaatctaactcaactggctagttcatactggacaggacagggagggtggcagtctcagaaatatttagggttgagcaaacaggaatgacaaaaaggttttactaggcggagcatgtttatggagtactggccctgggatgtctagccatctttcacagaaagcaaaaacaaaaactggagagatggttcagcagttaagagcacggttactcttccagaagacccaggttccgacacacacaggatggctcacaaccatctagaattatccccaggggacccggtgctgtcttccggcctctgcaggagcctcatgacctgtgcatttgcacagacagaacatccacacacataaaataaagataaaggctaaaaaacaaacaacaaacccttttctcttggaaccaccacaggacctctcctaggtgcccagctagggtcaagacgccatgtgtaggcccatacatatcagaacactggtgttagagacaaggctgggctcacaaatcaagaaaccactactgaaaagaacacgtggagcctggcatgaaggcacacctttcaacccagcactaggaaggcagctgtagttggaattcaaggtcaacctggtctatactgactgagttcccggacgcccaggactacacagagagatcttatctccaaaaaacaaaataactagctgggtgtggtggcccgcgcctttattcccagcacttgggaggcagaggcaggtggatttctgagttcaaggccagcctggtctacagagtgagttccaagacagccaggactatacagagaaaccctgtctcaaacaaacaaacaaacaaacaaacaaacaaacaaaccaaaaaacaaaataaattgaaagtggcttgacaaagcacagctgcgtgggtagttgccaagatctggaagccaagcacaagcagccaccaatggtgtcagcctttcttccttaactcaaagggcacttggccatgcctcactggctgaattcaacatcacaatttagacctgattggctggtttgaaatctaggaacaaaataaatcaaaggggtacagagagaagggatgggcttttttttttttctttttttgtttttttgtttttgtttttgtttttttggttttttttttttgttttttgtttttttttttttggtgtttttgagacagggtttctctgtatagccctgactgtcctggaactcactttgtagaccatgctggcctcagaaatctgcctgcctctgcctctgcctccatagtgctgggattaaaggcgtgtgccaccacgcccggctgggatgggcttttaattgtttttaaaatcattattttatgtgttttgcctgtacatatatctgtgaaccatatgcattcctggtgcccttggaggccagaagagggcaccaagtctcatggaaatgaagctagagatcctatgggtgctaagaactaagcccaggtcctctgggaaagcagccagtgctctttttccgctgagccatccctccagcctgaggggtaagttttaacagataagaattcgaggaagttgtggcgttgagttgatgagtcagggtgtcagacatatggacattccaagaagcagattacatctggctaaacacgcagtcttcgacaaagtaacaacagaggaggacctgagaggaaacaggcataagactactaaacatgcttgatagataaaaatgattaactctttcacacatacacacagattcttcagattctgttcagaggctctaaaggaaggggctatgtgggcactgggtggaggctgttggcactggctacccctgtaagccttcagagtagacctccaacacaaggttgtctatgacaacctcctagaaccattactcaactattataattatagatgttgattataagattataattatagatttataaactgaggtcatcattccattatccaagccattgttccatgaagttggtaaatcagtcatctcttcctacagttctggctggtttgttggtgagagcatcaagcccctggagagccacgctgacggtctcatacagaacaacattgtttggaacgaacaagtggcactgtcttcctcacacacagactctgccttttctagctataatcttgttaatcctgagccatttcttttctttcctttttttccccacatgtgagagatttattgggagagagagagaaagagaggaaggtggcagtagaaggaggggggggaagggaagaggagccatttctttaggactaagttgctagcccattttgtggacagcatctccagtatcgataaggaatcctttatgcttgtaacgggtttactcgctacaatctacagttttattaaccgttgaccaccagaacaggctcagttgaaattggttgctatttggttttgaggtttgaatttacttggggctccctgggacacttgtataccatctgtataaatatgggagtctgatgagtctcctggagttaacagatccctcttctagcgggagtggactttaggaaggtgagggcatctaaatgctgtagtgaaagaggtagccaatgggactaaaggacttgtcactctaagccactgataggatttcaaataaggatcctctacaattcactaggtatctcatggcgtgactggtcatctcttcagcacattgcccaacactaagccctattacattgcccacagggtcaatgatcttcccacctagagaagcacgagatgcgattagtcctgggggtgggagctcagtggtagctagggcctcacaggaaacaacaggactcattgctttaggcccctcagtcttggaagaggaacatcacacagtgcatgccgtttggattgaagggccaccccaacaggaaggggactatttgagtctctgaccatccagtcacacacaaataataaccactttttttttttttccgagacagggtttctctgtgtagccctgattgtcctggaactcactttgtagaccaggctggcctcgaactcagaaatccacctgcctctgtctcccaagtgctgggattaaaggcgtgagctaccactgcccggtaaaggtctgtcttaagtcttaggcttccagtatagctagctgaggatattggtcagtagcagataattttggggtctaagtgatggaacattgggaacaggtttggacttgagcaagggagtagtaaggatttgttagaagtaatctgggggtaagtgatcgcccctttacctgttttagggtagatttccctatgggctctgtcctggtccctaaggtctgaatattgaggattcttggtgtgggacatgctgttatgaggcatttgggtgacagtattgatgcagacagttaggagcagtgggcatgtttattacctgtcattcctccattagggctttcatagcatgtggggagggtggcttgtaagtccacccctaggagggtgggttataagcccattcctaatcctgagtggtctacagagtgtcccttcagtctctatgggctcttcacagcactgtgtttacgttggtttccagagttctgcagagacaaaggcacttaaccatcccagagttgtctttggctttttgtgtccccacagggtattaccaagcattcatcaaattggatagaagtatgttggctgtggctacatggttacattagtagtaaaaaacactgtccgttgcctgcattagaagcaagagtgtcactaaagtctttttttaaagtgagcctgtgacaagaaattaataggtttgccttttgaagtatcctgagttaaaaatagcctcagagagttaaggttgcaagagaggagcaggaactcaagacctgcatgaccctggcaagcacagcaccaggttgagatgtcacaggatgagagtgtagggtggtttagtaaggagtgttgagtattaaagactggtccgtccttccttcatgttcagatgagtttggccagacttggtagtcatctctttgactgcgggtcactttttggcctgagtgcatgttcttagacccttcgggctctgtgcagccaagcagaacttggtcaggtcctacccagagggttccatttccttctccccagaatttggtcagcacagttacctggctcatgcttctgggcaggaaacttggatggtggtgcctgggctaacggcccttgctacccaagaaagggcagagtagaccacagtccaaggtaatagtccctgagaaaccggttcttggctttaacggttgcagacctctagtaggattcagaaggataagtggtagaccatctcatatggtgtcagttccatgtcccttcaagggccagtcctgatttttaggagggcgatggagagacattttgtcagggtaattttgtttcaagtattagtttggcgaaatgtctttttagagcttgacttgccctttttccttgtctcagtaagactgtcgtcccccataggcccttatgtttgaatgtttagtcagagagagtggcactgtttgagaaggattaggaggtgtggctttgttgacagaagtgtcactgggtgagcttaaggatgaggatgtagctctcaactaccgctccagtgccatatctgcctgcgtgctgccatgttccctgtcataactggctaagcctctgaaacagtaaacaagttagatgctttctcttataaaagtggtcttggtcatggtgtatcttcgcagaagtagaacagtgactaagactgtcgtctatcagaggaggggagggtgccagggggtgtgatggtcccagtgcacttcacacacagggcataggctgcattttctgtctgtctaggtgtctaagtcagggtttctattcctgtacaaacatcatgaccaagaagcaagttggggaggaaagggtttatttggcttatatttccatactgctgtttatcaccaaggaagtcatgactggaactcaaacaggtcaggaagaaggagctgatgcagacgccatggagggatgctctttactggcttgattcccctggcttgctcagcctgctcaaccaagaccaccagcccagggatggtcccacccacaaggggcctttccccctttatcactaattgagaaaatgccttacagttggatctcatggaggcatttccccaactgaagctcctttctctgtgataactccagctgtgtcaagttgacacaaaactagccagtacactaggtaaagccatttcctctttctttctttctttctttctttctttctttctttctttctttctttctttctttctttctttctttctttctttctttttacatgatttatttttaaattatatgcccatgaaagccaggacttacaggcagttgtgagtgctgggaattgagcttgtgctttctgcaagagcgagcggtcagtgctcttaaccaccgagccatctcgctagaaccgccccctcctctttgtagatcctaccttgttttaccttgggggtagacacagggcagggaactcagggtaggaggagagatgtgggtgagatagaaaagggaaatttctactaagtggcctccttagcaaagtcacatgctagattgttccccttgatctcaggagtttgtccctctgggagtccagggacatgtcttgctgcagtgtattcaggcagcattaagatacagaggtcttgagttcaattcccagcaaccacatggtggctcataaccctctgtagtgggatctgatgccttcttctggtgtgtctgaagacagctacagtgtattcatttaaagtaagtaagtaagtaaataaataaataaataaataaataaaaaggtacctagaatctgagtgataacaaggcactcttcctgtcaattataccctgtgagtccagctctcactaaacgtgtgctacaccaaaggcttatttagaatcagagtcaaggccccgtttaaagcacacagttcgcagatctgggctaaccagttacctggtacactccttactttagggttcttgctgtattagtcaatacgcccaacaacttcagcacattagtgtttacctttcattctggaggacctgtctataaagaatgtaagcccagtcattcctatttgtgtgtgtgtgtgtgtgtgtttgttgtatgaatactttgcctttcatggatgttggttcactatgtgtgtgcctggactctgtggcagtcagaagaagacaccaaatcatttggaacagctcccctttggtttcttactttcctttgttaaaagaatggtggtgggctggtgagatggctcagtggttaagagctccgactgctctttcgaaggtccccagttcaaatcccagcaaccacatagtggttcacaaccatctgtaatgagatctgacgccctcttctggagtgtctgaggacagctacagtgtacttacatataataaataaataaatctttaaaaaaaataagagtgaatattctaaaaagaaaaaaagaaaaaaaaaaaaaaaagaatggtggttggttgtcacccactggatacattttaccagtccagagtaatagtgtgagtaccttgggtagtacaccacaggtggttgtcagtgtcctctgtttttgtgtttgtttgtttgtttgtttttgtttttgtttcgagacagggtttctctgtgtagccctggaacccactttgtagaccaggctggcctcgaactcagaaatccacctttctctgcctcccgagtgctgggattaaaggcatgcgccaccacgccagccccctgatctgtttttatggggagcagagttatggaaccttcccccagcactgagcatactgagttcccccttgggaaacaggacatttggaattttcctaatcaatgaaaggctggcatacccactcctcatctgtcttagttagggttttactgctgtgaacagacaccatgatcaaggcaactttttttttttttttaaattttttcgagaagggtttctctgcgtagccctggctgtcctggaactcactctgtagaccaggctggcctcgaactcagaaatccgcctgcctctgcctcccgagtgctgggattaaaggcgtgcgccaccactgccctgcaaggcaactcttataaggacaacatttaattggggctggcttacaggttcagaggttcagtccattatcatcaaggtgggaacatggcagcatccaggcaggcatggtgcaggtggagctgagagttttacaccttcatctgaaggctgctagtagaagcctaacttccaggcagctagggtgaggtcttaaagcccacgcccacagtgacacacctactccaacaaggtcacacctccaaatagtgccactacctgggccaagcatatacaaaccatcacattctactccctggcccctataggcttgttaaaacacatgaatctatgggggtcatatctagccatagcatattttttcttttctttttatttattttttattttatttatttatttatttttggttttttgagacaaggtttctctgtgtagccctggctgtcctggaactcactttgaagaccaggctggcctcaaactcagaaatccgcctgcctctgcctcccaagtgctgggattaaaggcgtgtgccactatgcccagctttttttttttttttttaaaacaacattgttatttatttctttatttttaacaatttttttattttttatgtatttttatatgagtacactgtagctgttacagatggttgtgagccttcatgtggttattgggaattgtatttaggacctctgcttgctccaatcggccctgcttgctcagtccctgcttgctctggcccaaagatttatttattattatacataagtatactgtagctgtcttcagacacaccagaagagggcatcagatctcattacgggtggttgtgagccaccatgtggttgctgggatttgaactcaggacctttggaagagcagtcagtgctcttaacctctgagccatctctccagccccatagcatattttaaaaagtacatttagccgggcatggtggtgcacacctttaatcccagcactcgggaggcagaggcaggcagatttctgagttcgaggccagcctggtctacaaagtgaggtccaggacagccagagctatacagagaaaccctgtctcgaaaaaccaaaaaaaaaaaaaaaaaaaaaagtacatttagtccaactttcaaagtccctatagtctatagcagtctcaaccatgtcaaaagtccaaagttcaaagtctcttctgagatccatccaatcacttaactgtgatccctgaatcacgaagctgggcaaactccaaactctgcatctccatgtctgatgtcaacgcagtcttcagatctccaactcctttttcatctttgttgactgtaacaaacttctttcttttgggctggttccactctgttagcagcattactcagcagatagcccatggttccgccatctcaaacatcttgggggtctccaaagcaacttcaatgttacagcttcttgtttcaatgtctgggatccacacatgatcttctgggctcccccaaagggctggcatcatttctccagcactgccctctgtagcactctaagcacaggttgtccactcctctgcctctgctgttcttgatggtcatcccatggcactggcatctgcagtacactggggtcttctgctgcaactaggctttgccaatggcctctcataggctctctccataatgccaagcctcagatcctttgcatgaccccttaagtcctgggctgttaactacaactgaggctgtaccttcaccaacggccttccatggcctttcacagtgccaagcctcggctgctcttcatgaccccttcattccttcacaagcagtaccacctgagtgactcttacacattaccaagtacagctgcagcacaaggtacaacctttgctatctctggaactcagcttctttgtgctctcagaaaacaaaacacttcccagaagatttcccctcagtgatgttggtctcttcttcttcttcttctcttttaaaatctggatgaaatggacaattttatttttggtctcttcttaatcactactaatttcttagctccagctaagcagctgaaagaacctagtggggaaacccccactcaatttccgtttggcgcgcacccaagaatcacgaacagacgaccatcttgatgtaaaagcatgaggtagtttaatgacggagctccgggccgacacatatctcccacaggagagagaggtgttgaccacatggtggagccataatggcggagctctggttcgaaacgtatctcacacaggagacagtggttttgaccccgaggcttggaagctaggggtttaaaaaaaaaaaaggggtggggctgggggaggaattggcgtggtttcacatgattggttcatttaaacatcaacagactgtcagaagggcgggagatagggaggtaccaggccagtcaggacatgtaacaactggcctgcccgggcatgtcctggcctgttctgctatgttctcagccccaggtttcaaagctcacaaacaactctttgggctatttgacataaattacatgaataacatgtctcaagttttatttcctttcacagcatcaactgtcccagtagtctcttctatttttcactctagagccagagtcacatatccaaagcctccgagtgctgctgcttgcaggaactggtacatggccctccttattctattaccagctttctgttttccaactccctcactgcctaaacttggctgtcctggaacttgctctgtagattgaccttgaactcagagctctccatggctctgtctcctgtaatgctgggactaaaggcatgtaccaccatggcaggatttaagcttttcttcacctagaacctggtttatcccaggatggtctttaactcagagatctgtttggctttgttccttgagattaagggtgtgcactgccatgcctgatctaaatttagttgggtaggatcttgccccaaagtcccactccctcaatctgagatctcctagaacacaggattcagctccatttcacttcccggtgcccttttaatatttgaaccacatgttatatatatttggtttttttcgagacagggtttctctgtgtagccctggctgtcctggaactcactttgtagaccaggctggcctcgaactcagaaatctgcttgcctctgcctcctgagtgctgggactaaaggtgtgcaccatcatgcaccatgcttggctatgttttatatttttttctttctcagcttgctatacttgcttaaaatgctcttcatgagacttaaccaaagaacaaagtctctgctgggcttttttttttttttttgagacttcatttttcaatgcaactaatataaatctcttcattttagcctcaagtagactctttagatgcgggcaaaacatagccatattcttcaccaaaaaaccacaaacacagtctctacgctacatactaaaattcttatcctttgaaacctcttaagccaggtctgcacaggtcaaatcactctcactagcaaaagtcttccatcttcctattaggacagcccattaagtcccatttaaagcattccactgcttttcaaatacagcagcaggacttttgacatttgttgtgtcttcttgcctttagtgtgggtgttttctgctcagtatttgagcatgaggttcaaagagctattcggggaagttttacgtcacgtaccgagtttgagtcaccctcttctgtgaaggtttcttacactctcgtagttgatgagaggtccaacactcaacactcctatggaggtttcttgtaccccagttctgaatgcttggtctccaactgattctttacagggcagttttctgtgtttggtggttcttagcaataggtgtgttggcacaaagtcctgatgaggtccaaagggacagccaaaaggctggagtcaccaggatacccctgggacttcagactgggctccaccatcagcaccatctcccactcgttctcgctcagcctccaggatgacccagccaccacggagtacctccatgctccacagtctcccttgctttgttctgtgtacagagttcaagtactacagctcttgcccgtgtccttccttgcactgttgaaaacctggttctcgtctagctgagggagtactacacactcagggcccagggaccactgcaacaggcctggatgcacttccctgggaagggaactgtgcacctcctcaggaaggcgagaaccctgggcaagcccccatgctgttacaggcaagaatggggtcacaaattaagaaattctcactcactcagcggggaggtggtggcacaggcctttgagccaagctcttatgtggcagaggcaggcagagctctatgagttcaaggccaagcctgacttatggactgagttctgggacagacaaggctacacagagaaaaaaacaaaaccaaaacataaaataaaataaaataaaataaaataaaataaaataaaataaagttatcactcaaattaggagtcacagcaaggaaaacttcacttgtgggcaagaacatccattctaaactggcctctgcctcacacccctaatgtgactggtacaaggggtgctatggctgcccctcactggctgagactcagcctcacaatctacatgcatcagctaggttgaaggaaagctagagggtacaggaagagaggtgtatgttaaccattccaggaaatcatgtcagtgagtcagagtgtcagacatatggacattccaagaagtagattatatctgtgaacaaacacacagtccttgacaccagagccaagggggaggacctaagaggaaacagacacacaactactaaacttgcttgataaaaaagattaagtggctcacagcactggggatatgtccctgtgggggcagcccccgctcttcccaatgcctagatctgcttgcttggctcacacacaccgcttctgtctccaggggaagacctggtagtggcaacagtccagagcggagtcctagagcttcacattcattccaattccgctctacctgggaacggagcgacccagagtcagggcaatctgtgcctggggtcagaggtcagcctggaggcggggcatgactctggacctgacagtgcacctcggttggagagagctgttggctgttgttggagttagtggactgctgggctgcagaggttcttctcctgttgtttggctcagagctgggtaccgagttcctctagaccccagacagcagggctgactctctgttggcactgcctaacggggcctcacttgaaccctgtgtacctaggggagagagagggttatatgactgtctgtgtgctgcagaccatggctaggaagcagaggcaccaggagccactctctgagttggctgtcagagccttcacccaggaggggcctgaggaagagggggctgaagcccctggtcagacctattccaggagaaggcctgccccttacctggacccattatttatcctgaccaaagttcaggcctgtgaggaaggtttccttgccctgaactggatcccttccttccttccttccttccttccttccttccttccttccttcctccctccctcccttccttccttcccttttcttttcttttcttttcttttcttttcttttcttttcttttcttttttctttttttggtttttcgagacagggtttctctgtatagccctggctatcctgctatcctggacctcactttgtagaccagggtggcctcgaactcagaaatctgcctgcctctgcccccccccccccccccgagtgctgggattaaaggcgtgcgccaccactgcccaacttggatccttttctcaaaagctgcatttgatgctgacctagctcacagcacttggcccatacacagctaccccattttgtcatgaagtctcagtttacacgtatgggatggaggtgggccttcaggagatatagggaacccagtgaggtgtgctgcacacagagaccccgataacccagatcagagctgcacatgatgggggctttcagagtaaccaacccaggactagggatctatccacccagcgtttctttctttttttttttctttttcaagacagcagggtttctctgtgtagccctgggtgtcctggaactcactctgtagaccaggctggccttgaactcagaaatctgcctgcctctgccttccaagtgctaagattaaaggcctgtgccatcaccgcccggcccacccagccttttaactagaaaattgatgatggtgatcatagtgatgttgatgatggtgatgataatgatggtgatgtcatctgtgcatcctcatacattcacacgcccacaaataaataaaaagtaaaatatagggctggtgagatggctcagtgggtaagagcacccgactgctcttccgaaggtcaggagttcaaatcccagcaaccacatggtggctcacaaccatccgtaacaagatctgactccctcttctggagtgtctgaagacagctacagtgtacttacatataataaataaataaatctttaaaaaaaaaagtaaaatataataagaataagaaagcatcctctttacaacaactaaaaagcaacagagtacaaagccagccctactccctgcatggcatgggcggttgagatcatacaagactgttcacattccctgcgtggtgtaagcggtcgagatcatgtaagacacatggggttcactgaggcagagcagtgttcttggggaggagacccgaggaccttcaggaaccctgcctgaaaagactgccttgaagcagcagcttgaattctgaggcctgagattctgcagggaggtatctgcttaacagcgtctgaagtttggggtccttacttggcctctgaccccattcccaccctggagatcttacaagaggttctgtctcttaggtgaaggagttcagctagtctggaagcggctaggttgaaccgtgtaagcttgctcttgttccagaatggttcttggatgccccctagtggcgacaaggaacagtacaagggggtgtgaagagacctttcaggatggcacctgctgtgagcagtttcctctcctgcagatccttaggggcttgcggagaaagaaactcactccgctcctccagtggggggtacttacttctttactttgggggtctggaattttgtgcatcaaattatttttatagaaaggatcttgtgtgccctgaaggtggaattgcaattccatgctggggtgctggagaggtggagacagatgaacccctgggattcactggctaaattggctgagatacaaactcatgagagactctgtctcaacaacacccagagctgacctctggcctgtgtgtgtgtgtgcgcgtgcgcacataagtataggccagtgtgtgtgtgtgtgtgtgtgtgtgtgtgtgtgtgtgtgtgtgtgtacaggcaagaggtgtatctgtgtacaggccagaggaatgtgtgtgtttgtgtgtgtagatgtatgtgtgtgtaggccagaggttggtagctttttcagtcactttctgactcactttgtgagacaaagcctcctgctgagcctggaatttgctgcgtcactagattagctgaccagcaagctgcaggacttctcctgtctctgcctctgggaccttacattacagtcctggcattacaggtgtgcgttgccacgtcaggcttctagggattgaactcaggtcctcatgcttgtgcagaaagcattttgctgattcagtcttcttcctggtaccaccttccaccctcaccaatttttaattaatttatgagatcaggtctcactatgtaggcctgtttggcttggaactcactatgtagaccaggccggccttgaactcacaaagatccaccgcttgggattaaagatatgtgtcaccactcctggcctccccctttgtaaaaacaaaacaaaacaaaacaagtctgttttgctagctgttttggtggcatggacctatgatcccaactacttagaagactgagggagtagaatgtcaagtttgagacttgcctaggctacagaattgagttcaaagccagtctgggaaacttaagtgagatgctgtctcaaaatgaagagcaaagtaggagctgtgggtgggtggagggctctctcaggttaagagtgcttcccagaggaccacactgggcagctcacagctgcgtgtaactccagctccaggggcttcagctccttctggcctccgtgggtcacagtactcacatatagaaacacacacacatacatatccaggtcgcatgggtgtcctctgtttctgaactgtacttcaatccagttgtagtcaagctgacaactggggacagtcatcacggtttggatgcagttatataatcattatgagacactcatttttgtttgtttgctttttgaaactggggtctcaccagatagctctggtgtcctagaactctctatgtagaccaggctggccttgaactcacagaaaccagtctgactccttctgtctctggagtgctgggatcaaaggcatgcacggccaccacctggccacttgaaaatttgttagtttccattgaatttgtaaaacgttcagagactgtttatctcctgcctcctgtcctctgggattcaaactgcatttatattatgctctgactttcctcagactttctctctctctctctctctctctctctctctctttttttttttttttttttttggtttttcgagacagtgtttctctgtgtagccctggctgtcctggaactcactctgtagaccaggctggcctcgaactcagaaatcctcctgcccctgcctcccaagtgctgggatcaaaggtgtgtgccaccacgcccggcgactttctcttttttttttttttttttttttttaaagatttatttattatatgtaagtacactgtagctatctttagacactccagatgagggcgtcagatcttgttacagatggttgtgagccaccatgtggttgctgggatttgaactccggaccttcggaagagcagtcgggtgctcttacccactgagccatctcaccagcccttttttttttttaagatttatttatttatatgtaagtacactgtagctgtcttcagacactccagaagagggagtcagatcttgttatggatggttgtgagccaccatgtggttgctgggatttgaactctggaccttcggaagagcagtctggaagagcagtcgggtgctcttacccactgagccatctcaccagcccgactttctcttttttaagatttgttttatgtaagtacactgtcttcagacacaccagaagatgacatcccatctcattacagatggttgtgaatcaccatgtggttgctgcgagttgaaccctgaacctatagagcagtcagtgctcttaaccactgagccatctcctcagaccttacccttcatactttctagttttattttattttattttattttattttattttttgagacagggtttcactctatagcccaggctgtccttgaactagcagcaatcctgtctcagttttaaaacaagggaagtgctgtgattagaggcatgaactgtcacactgtctgtacccatgctttttatggtttaaaactgccaggtggtagaggtggcagaggcggcacatgcctttaatcccagcactcaggagacagaggcaggcaaatctctgtgagtttgaggccagcctggtctacacagtgagtacagtgtgagaggcaagctctgtcattacctgagtaatgagatggcttagggagtaaaggccgttgctcccacaagcctaagaacctgcactgcccacacccatccccttaatactgttttttttttttttttttttgtgaaggttattcactgacatcttacagaagaccaagacttaagtcagaaagatcagggtactgaacacgtgctctgtttcatgttttcctcagccagatgtgggtaggaaccctgctggacaaagagcaaagcagccaggtgaactagaacgacttgactcgaccgttacaccagttgatttaatgagcacactgtgcttacctgtgcatgacttcactgtcacattggaccaggacttagtaagtgctgtcagccacatgcggcatagtatgggtgatgctgggcaaggtacggggtctctctgtgcaaccctggctgtcctggaactcattctgtacatggggctggcctccaactcagagatctgctggtctctgcatcctgactgctgggatcaaaggtgtgtgctgtcccctgccccaccttgctgaggacccttatttagtagtttagactcttttattcctgctaaaaatttgagctttcctattcttccttccttcctttctttctttatatatatatttttatttttgagacaaggtcttattttgtatactaagatcaaactcttgatcttctgcccacatctgcctagtgccaagctgcaggcaggcagtgtcctgcctctcccaaaggtctggaacagatggtgtacattctgtgaaagcccttatcacagccctgtctgctaatttaacatctgagtgagttctggatctctctctctctagtgaccagctaatctgacaatcactgaatggacaccaggccatgtgaattttccttgttgtgggcttcatgcagccttcctgcttcatttattttggaggtgcagtggagttactacttctttgatccttgcgaatcttacttttaccatgttaggtgggctctgggcattgtttttggcagttaccacaggctagacctttctgaacattctgcctagcatcatttgcattaagcttttctacttgactccagtcccagccctttcaaggagtgctgaatttgcagagtggagtttactaagatttctggggcttccttttggccatgctctccttcctggcacatcggctgcttcatctgtggccactaaggaggccttgagggttcaattcaatatgcacggatgcagccagagcagctgcagatctcaaaactaaaaccacccctgtccacatgccttatggatgatatgaacagtgattttcctaaggtcagaggctctggtatcctcacttcttttcttttttctttttcttttttggtttttcgagacagggtttctctgtatagccctggctgtcctggaactcactgtgtagaccaggctgtcctcgaactcaggcaggctgtccgcctgcctctgcctcccgagtgctgggattaaaggcgtgcgccaccacgcccagctagccttgcccttctagcccattccttttgccttgcttaaaaaaaaaaaaaaaaaaaaaaaaaaaaaaccacgatagattccattcttaaagttagccaccaaactctactcccttatatggtcacttcctcctcgtgaggctgactaccaaagtccagctattaaaagtcctatccaatcaaaatacaccactgtgcagcccggtctagcatggaaccccccttttctcttattaaaagttacacctgcaaggtcatttgcttgtgtttttctgaccaagtagaaaacagccactttaactcctcttccccacccccatttaaaggagctctctgtgaaaacaggtgcttgggtaaggtgtctgtgcctaatctgaaagataacccctgctgcgcgggaatttattatttttttcaaaacagggtttctctgtgtagccctggctgtcctggagctcactgtgtagaccaggctggcctggaactcagaaatctgcctgcctctgcctcccgagtgctgggattaaaggcgtgcgccaccacgccctgcgcgggaactcttaatgcatacatgactactggtttccaggtgtgaggaggaaagtgtagcctcggtttcaccagaccccgtgacagacagtcttggaaggtgatcaccagtcagtgtgcacatggcagggaggttctccccaagaccatgtaactgggtgtatgtcccagctccagactgcagctccagtcccagagagatatcaggcataaagttctacagatgagtgagcagtggattcactcacggagaaatgtaatctcaggagagtcgtcaacagcgtgggcagtcttgtgtccgggctgctctctgacctcgtaaacaaagaggcttactgagcattatggtgactgtggtctgggaactttcctttttcgagacgggaactcagtgtagtccagagtggcctcaaatagataatccacctgcctcggcatcccgaatgctgagattaaaggcgtgcactctcaggccagactcacttccctaggcgtgtggaccgggtggcggctggagccagaggagtagggcagggcctggggcgaggaggggcaggatggcaaggacgcagggtgagtagggggttcttgaagagaatgaatgtgcagcggaaagccagcggtccagctcatttgatccaacctcagtttcctcttcggaggattggtcttcccgttcccgcctccctccgccacgctcgttcccctcccaggctctggcggcgcctcaggtcggtggagtcagggatccagcagcggctgggctccctctgacaagctagcctcgagggcggctggaagacaagccaagtccaacctctccagcggaggacggaggggctggactccgcaatggaggcggggcctgaggaagaaggcatgtcttggctggaggcggagacagggaccgatgcctgtgctttgtgcggaaagagccaggctttctttgcaccggaagcggaagttaaaacacacaaacaggcctccggtatggtggatacgagtaccctgacccggaagcacttaccgaggacccgccctcctgcccaatagtgctgcggaggcacgagctacttcctttctgcgctctcgctggacaagtgagcaggtaggcctcggtgcgggctgtgtgcgagcggggccgggctgggccgggctgggcgcagttggggaggtcgcggtcacatggccgagagtgcttgcgggccatgggtctggttgggcccgcagactcggagtgcgggcctgaccagtctcaagacctgcgtggtaactctgcagggacggcctcaggatgcagaacgacgccggcgagtttgtggacctgtacgtgccgcggaaatggtgagcatctgcgggcccgtcattctcgcgcccgctttccccgctcccattcatccactgttcttttgcgacctattaaacgcactgtgcatctctttacccagctccgcaagcaaccgcatcattgctgccaaggaccacgcgtccatccagatgaacgtggccgaggtgagctgggaacctgacggttcctgagggaaggaattacgaggccctcaggcctcagcctggctcttggtgtgtttactaacatcggggtgaggtcgaatcttccaacctctttttttttttttttaacccaggttgataggaccacaggccggtttaatggccagtttaaaacctatggcatctgcggggccattcgcaggatggtgagttctaccacctggtctgccttgtactgttcatgtgacatctgagctctgatggtggtgtccttttcttcctgtgggaatggttttgggcttaatagtgcatgctctgcctgctaagcagggagccagctctgtgtggatactcaggtatttatttttaattttaaagggcgagtcagatgattctattctccgattggctaaggctgatggaattgtctcaaagtaagtgtgggggacaatctcacattggggttgagtggcttgggacttcccaagagatacagcttttaatactactttttcccctttgttaggaacttttgagcagaagaaatcgggaatttgttacaaataaaagttttaagtacctgtgacagttaagtctgcttttgctgtttttactatgtagggctggtgtttttattgtgaccagaaaagggccgcacacttacctgaaaggagacaagcaaggaagtatgttgcaaaaaccagttttactttaacaaaaacattttaacaccttccattcataacctactggacatacaccacattctgaggtctgacacagctgtgtcctgttgagcgctgcgggtgcagcaccaggtctgtggcattgggtcacagtccagctggacaccatggatatacctcagatttctggactcagtctataggactctgtttagcccgtgtttggtttaagggttggctttaacagtgctcaataccacaaaccagcagctcttagcgaagcttaggaaggactaacagcagaccagcttggtaaaatgaatacaccttactacatctagaagcttaaataacatttatcccatcagtcagccatatatatctaagttcatttaaaaaaaaaatgatggggctgccctgaagataacctgtttgcaggaacgacttattgcacctaaagatgctctgagaacgtggcatgcttacaccagcataagcatggacaggctaaaacgtatttactatcctttgagctcctgtctgagctgttactgatccgatagacctaggtggtcggtgtcaggcttgaggacgagcatctctgggacatgagactggaaccaagcggtggctggcgtctgccaggctggtgaccagtttctagggaaggataacaggcctggggaggtggaggatagctcttgagtgatgacagtggcacagggcaacttggcctgatgacatgtagtcattgacagtaggtagcaggatcggtgccttcctgcttgaggatcaagtgtggttcaaagtcagcagcaggcctgaatgggccattgtctgttcccatagagaccaaatctcaagttataatgacttttctccatcacgatattgcttaggaaagtcaagagcccacagtcagtggttgtccagtgacagggaaaagctgtgctggcaggaggcagcaggggttggccaaagcactgctgtgcatgtgacacgggtttcacagtggcagatgctttaacaaggtgcagtgagagcagactcagaatcaaggtgtctgccctatcctgtatcttgaccaaagataaaatagtgctgatggggaactgcctgggtggaggcaccagaagacagaagcctgacaattgtagcaagttcagaaggtctggacacctaggtctctacaggaatggtttcatgggtaggcagaaggaaggctggccctcaggattcacaacataagccaggctggtctcgccacacgaagaacaaaccaagccccacactgttcacttgcttcaggaaaaccctcaacagggagcgtctcgaggtcaaggcgtgctctgccccaaaattaaaaactttccaaggaagccaagctgccgtgggttgtgaggggcaagtgcagttactggaggagggacaggaacactagtcctctagccaagctactcagccttcctgccaaagcagcctccctctggggtgcactgtttgggctagaactgctgggtgaggcgtctgtagtgaggtaacacttggttctctgggaggtacagggccagttccaaagccacgagcaccgtgaactcaaagccaatgaggtctttcctgttgaaccggaacctttcctccagcttctgcagtgagggaaacaaagggtgaatgggttagctccatctgtgtccccgtctaaggcccagtgcctgctggtgcacacctcacactcacgtcaataagctgcttcacttcactcttgcggaggtcactgctgatcttggcagccaacagaacacaggctccagcacacagtttgcggttctgtttgttgagcttgccctgcagtacgagcttctcaaagtacacatatgccatggacacggtcacaggctccaagctgcactcttcagaaaggttccgcatctcccgttttaaactgtgggtgggatgggagccatgacgctggggcaaatccatgtcatgagacagcagtcacccttccatggctatgccatgttctgtgggctgtcagcacacatggagaaagcccagagccaggttaggtggctgggaaggggtatctgcctagccctcccttacctcctaattttgctcaatgtcagtttgatatgagggaacttttccctgaaggtctcattcatatccttcttgaggtctgcaggtttcacatactctataacggtggtctgtaacagagcagaggtgagtgggccaagatgcttgggaatggatgccctgcagcctgcaggtacacacatgagcatgtgggacttcaaagaggattaacatggctcagtctgtccatcctctggataagcccagcctgccaggcgttcagagctggctgcaggagatgtccagcatgactggctgtcctgcttgggcacactgcccttggctacaacccttcccactacctgttggtgctgggtggggacaaggcaccctgagatggctgagtctctggtgtggagggtgctcattcagtgtattacctgaaccttgaactcaccatgtatgaagcaaagatgagtacacgcttatgttttccacacggccactgtgggtcgtccaggaggttgggattgtattccactgcatctcccccgtcgcttcctgtaggcagaggcagccaatgacagcctagatcctgatcagaacccacacctcccctctcccattgcagccaatgaagaggcatgagggcaaggctcaggtctgagaggtgctccaggtcacaggccagctagggcttaggtccaagaagtgatgcctggacaaagcctgcccccttcccgtcccacactgaccctctcttctgcctgactcaggcagagcctagggccacattatctggaatcctttcctctgagaagccttggtgcagaggcatgagtgtggcttatactgctgtctggcccatggctgtgcctagcccagaccttggctacctagttctgtgccagctggtgttgacttggtaggcacaggtttgtgtcttgaacctggtggagccctggggatgctgggccgaggctggggcagcaagccatggctgtcattcttgtgtataaccagagcattagtagggtacaggaactttgcataagacacgacctggaaaagcaatcacattagctcagttctgctccccaggccagaaagtacaaccaagttctgcttccctctgccctccagtgaggagcctgaagccatgctgctacccagtcggagtgggtactttcaaggtcagagcactagcttccatgcctaatctgtggtctgtggccaggctagtctctgtcttggaagacccttggcctacttactggtccagaagcaaggctctatgtggagaacccaggggagcagttgggttacccacagctagcagtggctgtgtatggtgtactcttaggcactttctctgggtggcatgagccagctagtgacaggtgtaacggggtgtggcttgctcccaatactgtgccttaatgtgcagcacctgtctgcctaactctgctggccaatggctggccacagggctcttgcctttccatctgctcccagctcaacgccttccaattcaaagaccatctcagaagaaacagaaacgccgccggatgggtgcctctgcttctggctgtccaccctcaggtcactgcaatgtatatgagagggagggctgtagtccctctgtctgtggtcagtgggtgggtgctcggcccaccgggaatccacccacacagagtgctcctgccacaaagtcctcaaaacaggagaagggggcgggcatgaccttggaggtacatgacagaaggtttagcctgagggcagcctgtatcttaactcctgccttgtggatgacaggatagatgtcatctgtcatagcacctgggagccaccactctggaacatccctgaaaacttaccagactttggcttaaattcgcttcccaggtgcctcagtcccttcacctgtagtcacacagttcagcagctggcctgggatcctgagaactggctatctcccactctggacaggaggtttttctgtgccgactattgttctgtggggtcacacacaacactgccccgccccaacagctgtttccttcttccctgaattatactcaggacacaattgcctgggctggtcacaaggttttaggagcttatttgagagaggttcaggaatatctcagtcaacctatatatagcctactgatacatacctgtatatagctaacctatatatagccaacctatatgtagcctgcctatctatctatccatccatctacacacacatcccacacacatatagatagtctggacagaacccgtggctccggggataagaacctggaatgcaaactcctgggctgtggagggagacgatatgctggccccatgagtctaaggccccagcctacactcaagagcaggccacactgattgtgctcagcaggaccagggcttacccgtgttcgcagcatgggcagtttcttacctgatccgtaggccttctccatagggcaggactgagaaggccgcacacagggaccgcttggcacagatgagtacaatcctgtgggaggccgaggtcagagcagggcaggaactctgtcctgtctacatttgggtgatgggaaactgccagagccaccaaggggacttggattccggaagccaggtctggcatcttagcacttgggccagattccctagatctgcttaggaagctccctgctcccaggagcacaggttacccaggaaagggcagcttcattcgcacaaagagagggcacaggaagctgccaagttcattggcaacaggctacagagtacaggcaaacacaaggtttactgctaatagagaacacctagatataatacagaactaagctatctaggggggcttaggactggggcccctgaatgctcaaagctataaccataggccaccctgtggtctcaggacttaggatttgcaggtcctgcagcaacagttcctggggatacttatcacggtgacctacagcagggaagggactgagatcagagtgacaggtagtgtgtttgcaccagtgcaggcatatgcagctgcccagattctagcctagcactgttctggggacccaaatactagtttgagttaagcctcccatatgtcccccaatatacctcatctccatctgtgtgtccccaatggaactcttagtgctgacaagtatagccatgccttatcctgtatatgtgccccaaatatggtcgcaccttctatcctgggcacatttggggaggggggaggcatttttgctttccctagtctctttttcttaagatctgtgtccagctgctggcccttccctgggattatacagtggtgcctagtctctttttcttaagatttgtgtccagctggtggctcttccctgggattatacagtggtggcttgctggcctggctatgctagccagtgttcaacaatatagagggtcaggggacaacgggtgatggagaaggggctgctgccaacaggggcagggcctgggtctcatatttttggcccccagagacacggcctgatcctacagtacagggagcacagtggccttcccgggcctggccctacactcactcacctgctgttctttgtgtcatactgcctcatgttcttgatgaagtgggttttcttcaggcctttgtgtcttggtgatccagatgcatgcttggttctgtaaggtaaaaagcaggtcgttcttgccctccttggactttcttgtggctcctggggtcagaggccttggagcaggggcaggtagggtatatacctctgcaccgaggcacatcccactgtgtcttccagaaactcaagggaacagcgctgagatgtgactcgtctcctgtaggaagacatcatggcctcagaagagacagtacacagactccaggaagcctttgcggcaggtccctgagcagaactgaagtcatgtgggaatatgcagggagtgcgggcatgaaaccaagaggcttcaagacccggtgaaccaagactgcagtctggggaagtccttgtcctaagggagagcaactggtgcatggcagttgcaacacacacacatgtacacacatatgcatgcacacagacacaaacacacacacacatgtacacacatacacaaatatgcacaaacacccctcccaggagctgtttctgggtctagaacattcttttccaaatgtacaactaagatttccttgtggacttggggttctagttccatgttgtccctcaggaagacctgttggtgactgtcactaaagaaagatggcagctctgctttgggagcactgatccctgtgggtcatgttggctcctgggtcccctgtgcctttactcaggaggccaggacgagggaggcagactcccagcactgtgtgccaggagaggcttcttcaggccgacgaatgagaccaggacaacaaattcaagtctttagtcccaatgggcaaatgactagtcagttacagatcgtctggttcttccaggacacagttagtgagagcaacagccaagctacaagcttacagtgtgggaacggaaggggtggtctgtgttctgagcttgaagcttgcccaagacctcgccactgacaagtttgtgccagggctccctgaaagcacagagtcaccaggagcctcaagctgaggctgaggtatgccaaacactgtgactccctccttaaaaatgagggcctgtgactagacttgagtgggctatagtttcccatctttattctcctattatcagccatgtggtatgttattaaagaaaaaataaggaacagctaggcatggtagtatggacaatggtgagtttgaggctagccaaggctatatatatgagacctcatctctttttgttttgttattatttaattttaaaaacagggtctcatgtgctccagactggacacagactcaataggtagctgcaaatagctttgaactcctaatcctccaacctccactgctgcctgttgggattacatagaaaagcaactcctgagctgggcatggcggcacgcctttaatcccagtactcaagaggcagaggcaggcagatttctgagttcgaggccagcctggtctacagagtgagttccaggacagccaggactacacagagaaaccctgtctcgaaaaaccaaaaaaaaaggtcacaaaatgccatgattccatcacttcttgctacagcatctgaatgtgtatacatgtgcgtgcatctaagtgcatgcatctcatgttgaagagcttgagtctcacacatggtacacaagttgctttaccactaagctacactccagaccctagaacacacctgtcaaatgcacctgactcagcttgtgtgcaggatgcctgggctatgaaggattaatgatatatgtcaaacactctcactagtcctcactccaagagagtcctgaaagtagatatctggccaaggaattcaccagggcatacagtctgaggcttcctaaacagaagctggaacatatatgagcttatatatggaacatatatataagtccactcctgcctggacttcagcaattgtgcaggcattttcaaataaagagctgagccacttgcctgtgggatgactgcacgagggacagcctctctgtctcagctctgccaactaatagtctgccctgtgcaaaatgtgtggcccttctgacaagttcaaagcagccaaagggctctccaggccacacaactgccaaggcacagacaccggttctcccctcttccctgtagcaggattcatgggtaatcttgctcttcaccaaaaacattctgaaagtgcagcagatgaggccaagtactgccacacttggaaaaccacccactcagaacagtgatgatggagaaggctttgcaggggatggtacagatgttgatggctgtggagctactgctggggatggtggtggtactgtgatgtgtggcagttgttggtggggatggtgtcagtggtgatggcagttagagtgcctcagttgtactaactgatgctccacgtacgcatggtgtccttgtgcctcaatctgtaccaagttcctctcacccagtgggcacaaagcacaaagtggctatgtcatagttaagaagcctccagtggtgttggaggccagcaggcaaaggcatactgaagacacagaggtgaggtgagcctgacatccaaggacttccaggtacctggagaggaaagccccaggctggcctcgagccagaagccccaggcaggaatgccaacaaggactcaagaccaggacctctctacagcttccttcagggttctgtggctgcggggtgcagagggtctcccagacaggggagactcagtcagtccccagtgcagtattccctgagagctcccaatcacatctgcctgtccgtccttccagatttacaggtggggagctcttttacaacattaaaggcttcactgacttgtgctgtgtctgatgcaactaagctcaagttcctttatcaggaagtcctctggctggacctggaaattcagcgtgagcctctgatatgccaaaggtccaagggactgcagctcagaaacgcttatcctcaagggcaagaaaagcatctcccatcaggtgtggagatgtggaaagtaggttcatatggagaagctgaactaccacacaggctgaacttcagctgctaccagaaacttctaaaagagccccgggcctgtagtctaggcacctgcagatctgagcatgccccgtaagaagcaggtccttcacactggggtgctggtgggattatgtgccccacccccatatttgtatattaaccctagggcctcagaacataactgagcttggagatatggcctttaaagagattacctggggtggcccttaatccagtgtgactggtatccttaagattaaggcacagacacacagagggaggaccatgtgatgacaagggaggacaagtctatgaggccaagggtaaggcctcaaagggagcccgccataccttcttgggcttctggcttccagaatgtgagaaataaaagtctgctgcttggggctggagagacagatgagtggttaagaaccctggttgctcttccagaaaacctagattcaattcctagcacccacatggtggctcaataccatctgtaacaccagttctaaggaatcaaacactctattttgacccctgtgggtactaagcaaatacatggtacacagacagacatacaagtaaaacatccacacatattaatttaccagcccactgtctacaggggctttggaatggctctagacttcattgtgaaaaggggctcccagggtgccctgaaggactgctgtgtgcttattgtacacagagccttggcctatgccaaacgtctggcagtagccatttcctgagcatgaactctggagatctgcatctgattaatgtcagatccatactgtccctgcagcatcattaactgaggtcttgttccagcaggatagttggcttacatgaggtgtggcatggtcaggacctacctgtcaggcagagccatgaagatccctgaaccatatccttgcctgtgcttgttgctgaaacaggtatatagccattatctcacaccagcacgtcaaaggctgtgacactcacacaggagtggggatggcatagagagccttggctcccagactgttcatggttctcccttctttcttacatggccacttacatccgggcctgtgttaggaacaagacaccacccagaggctctggaggagagtgggtcaggtaccttgcctagaagcatggcccgagggaaaggctaggggcctagggcaggaaggatgctcacttcgtggtgggtggtgggggcagactcgcccagagaggattagctaagggctggaagcacaggacagggaaaagcagctggcctgtggtggaacagaatgtgggacctgagggaagagtctgttctggggcccttagggccatctgcctggcatggcattcgctgaggtaattaattatccaggcaaaaccaggtggctgatcgtggccctgggatctcatttgcaagtcctcagagacagtgtgggagagctgtggcagatctttcctcaggcgccccgcttgctcttcctgctattttctggtccctttagggatggcatgctcccttgggagcttgcacaatgttcccagttggtccaacatcttgctccctgtggttttctccttcctcacaagcatgcgatttgtaaacccaatcatcagaactgtaccaggtaggcactactcttattcagtttcagatagggaaactgaggtacagagccattcaacttgtctgaaatcaaacagctggcaagagaggagtagaggcccatgtgtatagctcggctactctgaggaaggccaatgtgtataggttggctactctgaggaaggcccatgtgcatagctcggctactctgaggaagggccatatgtataggtcagctactctgaggaagggccatgtgtataggttggctactctgaggaagggccatgtgtataggtcggctactctgaggaaggcccatgtgtatagctcggctactctgaggaagggccatgtgcatagctcggctactctgaggaagggccatgtgtataggtcagctactctgaggaagggacatgtatataggtcagctactctgaggaagggccatgtgtataggtcggctactctgaggaaggcccatgtgtatagctcggctactctgaggaagggtgaggaagggccatgtgcatagctcggctactctgaagaagggccaggttcttgtggtgcagacaccgtaagaatcagaccccatggtgtgccctgccctgcccccaccgggagccagagtaagggttgacatgtgggatgtctgtgtatatgatgcataatatgacactctatgtagcggtgggggtcttggtgaggagacagctgaggagggtatgtggaaacgcaggggctgctcatggagcgtacggtggcatgtactgtatgtccacaaatacacggggactcctgtactgttcacatgtgcctggcacctcaatttgagaatagctaaaagcagataaacactgaggagcaatctggactttctgtcgcctcagctgacactctccagacaactaaaaagtcccaagctcagtacctcaagctgcagacgtacaggacagtgtctgctccagctccatggcatggttgcatggcaatgactggagccctctacatgtgacgtgggatgaagaggccaggggtcaggagtgagagggaaggtgctagctaagagggcttacccgctgagcagttcagctgtcctaacagctcagagctgccccttagcaacgttgctgctgcctctgaagtccaccctcctctgttcttcagttggtacctgaaacctaactacagaccttaaacaacaactggtatgtgacaggcttccttgcttggaacttgggagatggggagaggtctaggcaggatcacgtgcccgtggctttgattctgtgccctttaggaatccaggaagagtggatgggctgtgcaggctcgggacagactcaggaaccacccgtcacatgacaggttgcagagaagtccctagtgaggagcccatcctggccagcatgctcaggagtctgggaccctcctccactaagcaagcacaacagcattcagtcagagcccggggctctgttcccctgcccgagcacaccatttagctcctcacagacctgtatctgctaaaaacccaaacaaataagcaaaataccccatggtctcctggtgagtctccgtcccagcactccatgtagagaggcctgtggtccagcagcttcacagagaaagagtggggcctcagaggcagggtcagcagctgggttgtcctggcgactgactactccagtgggtttcagccccgagtgagcagattctgggcagagactaatacccaggtgccaagttgctcaatggctcctctaagtggctcaggtgctactcagggctggcctaggcccctctttgagatcaaagcagaacacagtctcctgcctctaggcccagttctctaatggtgggtgcaattaggttgcaatttgcaaagtcatttgcctatggggactttcccttcctcttcatttctccagcaggtactaagcagggctgttgtaagttgaagtagttccccaaaaagatccttcaaaagcctccttaggggcctaagctacagacactctaggaagggatcaaggtgaaaggaggacaagataaacccgtgaggacatgcagggaggagccccacgtggagacaaggagagggatcaacacagcgtaagccaccggcacccaaggcctgtggaagctgtacagggtcaggagcacctccaggttacagcctgaccttcagtgattggcatccagggctggggggaaaagtgctgctgctgctgggagcttcctttttctccatggccttagaggtgcacacacaggctctctaaccagaaggcagcagtgggcaagtagctggaatacacactttgaacgggaccatagagcctagaggtgagcctccttccaggcatgcagtaaaagagacaataaacagctcaaaagccctgtgcagacaaccagcagtgactctgtctattgctagaaaatactcctgagagcccaaagtaggatcaaggacaaaaagcttcttgtcagcctattccacagagcaggagactgaggctgtaagagatccattagctgttcaaggtcacagagctaccggatggaggatggctggtctgcactcactgtgacagccttcaggaggccagccactgttgtctctcctacccacagactgggagctggggtagaccgtcctcctgttgaaggcctgtgaccacacaaggataacaactctcaggatgaagtggggcagaactaggaagacggatggctggaagagctaggacggcgtgggtaccaaagggagcctcaaccacaaatgtttcagcttgctcttcaagggggtccagctaactaacactctgggacaaactgaccccttgtccccactgtatccctctatgtcctgtggagaagcatgacctggccctacctgtaggctgaggtggtagccacagaaagttgaggtcctttggccacagatatgtgatgcagggtcagaagtcagacagcttttcccatcacagacctgcctagggcttcccacacctgggagccagccacctggcaggagctcggatatatagcagtggggcctgcccagaagggacctcagtgtccagacttagctcccgctgtcactcgttaggtgaaggctgagaatgcaagagggagctgagcaggctgagacccacatggtgctggtagctacggccatctgggaagtaagcatagccagggaatgggggagtagtgaggaataagagctgtcctgggctaggatgaaggatcctaggatccaggcaggggaggcagaacagttacatgttgcagaccctgagtccagcaggtgtgggacagagggcagggaggtggtcaggtgtataaggccgagtagagatgagaccaggtaggtaagaccctggcccacaagctgagttgggcacacagcctgtaaaaagtgtttgtgagtctctgtgtagggtagccaggggagggatgtgtctagagtcaattagaccaagggaactccgaaatccatattcaggggactttcaaggtaaagagctgaccccatatccaggagctgacagctttagtgggactttcaaggtaaagagctgaccccatatccagaagttgacagttttagtgggactatcccttccctctggaggctgaccagcttcagttaatcccaaactcatctcctgtattctggactgatgctgccacatcacctcagtcccagtcaaggacagacgggactgcgagcctctctgactcttgcacgctgcggtgatgggccctcaagtaccagaatgaaggatccctggaccaccctggctcctgcattatgggctgaagaaccctcttccctaattacccgacaccttgatcttgggctggtcatcttgaccctgtgtcctgggctgaccattccggttcacccagacctctgagtgttaagttgatgggtaccaggtgaccatacctgtgtgcggggtgaatggacccacctcatcccaaccatgtccaggtctgccgagcttgtggcttacccgaacccataggtcaactaccccacaacctgggaggagggacctggctcaccaccaccggtgccccgggctgccaaggccataggtcacacagccggagtgctggttaggcctctaggccaccaccctgaccccagcgtgcagccgcccccgtccagcccactcacctttggcgctgcccgtccaggccaaggccggcgggcgccgtcgtggggctgagcaggccctggggcgcgggcctggctggcagccccgggaggcctccaggtggagcgggcggcggcgcgggcgcctcgcgggcctcggtgggcggtggcggcggcggcgctggcttctcgcctccgggacccaggctcgggggccgtccgtccagggagatgttgttgagaaagaagagggcggcctgacggcgccgggagtccccgcgcctccgcggcacggccggcgggttccgggcggccggcgcgggcctggaggggccgggggccggacccggggctcctcccgccgcagccgcggccatgctcgagtgcgccgccgcgccgcgccgccgcgcagctgcccattggccgcggcgcgcttgcatgcaaataccaccccgtcactcccgcccattggccgcggcgcgcccatatgtaaatatagttccgcggttcctgtctattggttgcggcgcgcctgtatgcaaataccaccccgtcgctcccgcccattggccgcggcgcgcccatatgcaaatatagttccgcggtccctgtccattggttgcggcgcgcctgcatgcaaatgaggctcctctgagcccttcgatcggctagcgatatgtggcttgccccggcgctcccctgagtcctagagtcttctgtctgttgtaggtttggcgtggctaaacacggcaaggtcggtaggtgcacggaacctgtgtcctgttctcccgtccaggactcggtgtacagggcacccttcagcgaatgttcattatgggctgcagactcagggtgcgggcctgttgtggtcacttgctccggggtgttccctcagccctggggttcttctgggcaggtatccatccatgttccaccagagcctgtaacttccgggctgtgccgcctggcctcctcactgactgctgaagacacccgtctatggtctgagggcagctgacatctcagttgcctcatggacgtggtcttgagtctgcatgatactggagtttcagtttccttcgtggaggatgtccaggactcgagtatacaaacccttctggctcagtaccgtgtgtgtatgtcggcccttccctgtacagagtcttcaccctaccatcacctgctctttccagctcccaacctatgtggacttcttatctttcttttgttttgtttttcaagtcagggtttctctgtatagtgtagaccagcctggcctcgaactcagaaatctgcctgcctctacctcccaagtgctgggattaaaggcatgcgtcaccactgcccggcgacttcttgtctttaaagtgtttgatggatcattgaagaaacacaaaggaaaatctccccaatgttctttttggtctatggtcactgcctgctctggtcctgtggctgcttaaaatgggtgctggagtggagttggttgagggagagagatccctgggaagtggcttctttccttgggagaagccatcggtagtgttacctataggagttcatactgccagttccttccctgcttttaaggctcaggcaggctgattctgtcagacacccccctctatccatggcatctccctgtcatccctgaacaagtaggcttacccttactctgttctgacccccctcttctccactgccttttcctagctaccctgccaggaaccagtgacaaggtggacagttttcctgtctagtagaacgcagggcttggtccattgagtggtgggcactcccagagagagtaatttctgtcagggggtcatggtgtctgctgacctggggtggtgtccttcacactcaggctgcttacctttctgagttttggtctctggtagtatgaggtgctagctgtatgactaagctgctttgggatgggtaattgatcgtggctaacagaagccactgtctgacagggatgacaaggaggtgtgctcctggcagggtaccatgagtgtggacatagccctagagctagaccccaatattggcagacaaacctgtgaggtgattgagggacatttaaacaggaacttggcctcttcctgggtgtggtactgtgggtttttttccctcacagaccaaacctgaccaggaggtcaaagtggataaaacatacagcttgtgttttattcaaatttgaaaaagctgaagaatcttgtaactgattgaacacacacacacacacacacacacacacacacacacacacacacacctggctgtcccttggaattttgtccttcgggcctctcaggtgtgctcagtagagaatggtactctgttaagcccaggcctcacccagtcccagtgacagtttctccagttctggaagtttcaggctcttacaattatacccacagttcccttttatgctgtagtccttctacctggtttggccagctccagccttcctcactcagttatggtcaagtgagttctccttggctttcaccctgaccttttggcacatatttagatgcttataagagcatgctaggaactttgcctgcttggcacacttctattcaaccctcaaaacccaaatctaagcttcaggtgccaccttccttgacctccccaaggcagcttctttctcccttatttccccacactggaccctgactggtgctttgccaacagtgcctgtttttgccctggaaatggcagctcttaaacttcatacacaggtatttccctaagtttcttcaataccatcaggatctagtggttcagggctgattcttaattcttagtcttggttgcatctgccaagactccacaagggggcgcctgagaccgcgctgactgaagcgtccttcctagcctggaaaagtctgggacctccatctcctctggaggtggggaccttgcccagaaaaagaagcagggctaggctgaggctcccctattccccgccctgccttcagatgggaggagcttcccagaaacctgagaagagacttggctggccagcccctctggatgtaggcggagcttatgggcattgactattccgagctatcttcaggtcgtgtggcttgacttgtgcaggcaacagtctgtgacagctacctctgggcaaatgcagtgtccctcagtctggagagttaggtctcccgacagctgttaatgggggagaggctgaagtcctcctttgggctcctgggaccttccgccggtgtcaggggttccttcggtttcctcttcccttgggatggcttcttgggggctgtgggaaagatgaagttagaatagagatggcagcagccggtttttctggctttctacttctaggctcaggaaaacgcaacttggtgaagtctgttggccactcttgctcctgacaaggtagtgactggctggagcacgggaggagacccacaagtatgaccaaagggctgactctcacagagcctaaccccagagtctctctcactgccagcgtggctgggactatgaccacaaggggtgggcatctggtctgggcaagtaacacccaggaccttctgagatgctgggtctatggagcagaacctcagtttccctcatgtgtgtcaagtggtgttgagtctatgtgctggtcagagcacagacagagacagctacaaacccctcccattctgcatggcttgagttaatcctaggatgtgtgacatcctgctaggcaaagtgggagcatgaccctcacgggacatgagcctgttctcactggctgtcttactcaacgtgaaaggcagaaggtgagactctggtaactcagtggaccacaccccagcccgtgcgtacatagcaggaagtgcttggaaatgacacagaaaccctggcctccactcggagcaaacacaggctgcggtcagtccctttccggcaacaatggcttattgtggtggccccagcccagcctgctgagctgtagcctgggcaaacatagggtacatgcatattagcttaggtgttcaaagactcaccattgtgcaccggaggaggaagtgtcctgacactcttacccaggaccaggctgggagtctgctatcttatcagacagagttgaactcaaaggtaccgccctgggcaaacatgtgagcagccctgacactgaaggaacacataccccagagccagctggatgtgcctctgtggctgcccagagggtcacaagagggtccaaagatgccagcaccagggagctgcttacagggcacggtataactgtcttcaattccctgtctctcttttggagactggggctcatattgcctaggctggccttgtggcagttgaggatcctaatgtaatttacattgttcccgtggctgggggtggtggtgcacacctttaattccagcacccaagaggcagaggcaggtcagtctgtgaatctgaggatatagcctggtcttttttacagagaaagttccaggccagtcggggctatatagtgaaaccctgtctcagaacaaaacaaaagaacaaatcagaacaaaaaccaacgcattgttctctgtggaagatgttatttctttatgtgtgggatgtgagctccagaggctcaggggtgctaggcaagccttctgccaactgagctgcaccccagaccctctcagccgcactcttaactcttaagtttatggaactctggtgttggtcttcttgagggaaggaagctaaggcccaggattacctcaaggaggtcatttggccaggattcacagaggcctttcctgaagaggctcggggcttctatcaggctccaactggaacccagatgctattctccaggtgtctagagacacacccatcacattccaggccccgctttcccctcccggaggtaggtacctttgtcctgcaggtctgaggcccgcttcctcttctgttgctgactctgttggtggtcttcagcatgccccacccctggcatgcttggctctgcacttgcctcagaaatcaggcccgcctgggcagaaggagacacgctcagggcaaaggacaccctctcctgcctgggcatccgccaggactaacttgaatgagtgactgaggacccaccttggtgtctgatgtgtctgactcctccagttgctccagggctagcctttgtgctctgaccttctttggctctaaaagacacgaatgaggtcagccagactggcagtcttgggcatgcagtcccaggacaagaaagaataatgactcttcagatgaggacatagaggggctgcccccggggatcttgccggagttctgaacctaggttcacttgctaggtagctccctgcttggctttttcagccctgtgagttggagccttcccttagaacaacgtcttctggacctcacagcctctatccacagtgggggagaccctgctggaggcctgcaggctgccattcacatcccttcccactgcacatcacttctgactggaagtgctctgagtgctaacattacctgtggtcccaccagtgtcaggcctctgcaggtgaggtcctggctgtggccttcctccagcctcctctgcagtccttccaggagaggtcaggcccatacagactcctgggagagggtgtgaggtatcctgggagaggcaaattaatggtttgagtctgtctgtctgtctctgtgtctgtctctctttctctattttgtctgtctttctctgtctctctttctctattttgtctgtctgtctctgtctctctttgtctctgtctttctctgtctctcttttgtttctctgtgtctgtctgtcgtctgtctctcttctctctctgtgtatagctcaatcttcagactatcgtaggtgttcagtcctttccattcgagtgtgaacaagacaggctactctttggtattagctggtggggcagagagaagaaggcagcccaaggaggtgcaatactacctaccctgcagtggagctgcatagaggctgaggacagagctgggatccttaccttgggagtagagtattcttcagactcctgagctctggtctctgtgctgacattactgagagtatgggagctgggaaccaggggtctggacaaggtgggcagctgggggctgggagtgtagacaattttagggctgagtggcaaaggttggccagttgacttggagatgtcccgacaccgtcctcggtcagagaggtccagaggcttgtctggggggcagtcctgagtggctacatgtgtctccttcctctgggagctaccttggcctgtagtttgagggtgccacccatcaggctgggcctctgtactcagagctggcttgggggcctcactgtcagagccctcagaatccgagcccgctggtggggaagatggcatctcttctggtgcagatgggacctgcaacctggcagtgcttgcccgtgcccgtgcccgcaggtgctgctggaccagaagcaggtgtaatgccccttccagccgtgggtcctgcatgcccaccaaggcaccaggctcctcccatgcctctgcctctctagccttcaggcctcggggcagggggctatggggagccacagcagaagccagggggctactgtgggggctctgcaggcgcagagacaattgtcggttcaggaggcagaggcgatcggtctgaagggagtgtttcagggtctcataggctatggctgatggcctggaggcccgtaagaagctaggaggaagagaagagtgatgttagtgatccttggctagcagggactggctgagtgagctcccagagggaagacaaaggtatgccacttcatggagcagaaagctgaggcccgggaaggtcaggcaagccacctgacatcacatggctatgggagagggaaagctctcaggccccggctctggatgccactgtgtatagaaagttttgccaaagaggacccaaggtggggacactggatcctaggccttctcctgtgtcttagttagctttaaatgtcatttgatacagcctaactgctccctcagaagacagtgtcagttgagggactgcccagatgtgattggccgatgcacgggagattgtcttgattattaattgaagtaggagagcccagcccttggtgggtaggtagatgctcttagcctgcataagggagctaggtagctagcatcctcctccattgttcctgctgtatttccttggctgtgagcaagtcccccctagaggtaaggctgcacagagtaacaagcaggcctgtctttaccttcctgcttgaatttctgccctgacttccttccaggatgaactttgacctgttagctgaacaaaccctttcctcccttaagttgcttttggtcagaggttttgtttaccacagcaacagaaagtgaactagaagatcctgtggaggaggcactagctccctggagtgtctggtcctcctgtccatccctcacagccccactggctctgctaggcagtgagactcgggctttacatagggcttctgaagtcctagccaaggtgtatgcataccagtgtcctgactcccttgtggcctagtcactcaggagctgtggaccaacccagatgtctagaaaagtcaatccaggaagaggtggggtacctggagggatgctgagtagcacttcccaggctgctgactgctcctctactatggggtaccagcaaagagttgttcccagtggtgggggtgacacctcacctgtccacagggagaccatgttcgtacgttgggctgggtggggtgcttctcgtggatggcgggggtgtcccatcggcagaaccgctgtctggtgggcaggccctggagccaggccgcaccacggctaccgttgaatgcagctggttggagatgcactgtggggtctgtacaggatgggtaggtcagcatggcggggcacctcacccaggcctgccttcccctacttcatgggaagctcactattcctgtgtggcctggggatgtgaagctggtagtgagtacctctcacacagtgggatgatattgccagcccgcttgcctggaaggcacgcagtgtgagggaggtcaggagttacatccttaccatgtctagagcccgtggctctggcaggttggcagctggggagactctggacactggggatgtcttgtggcttgatattttatctatgggaggaggagtgacagggagctagggggatgctgtgggatcccccctgggtctccatccaccccccccccccgtctcctcctaccccaaccctgcatacctgtgcccgattgctcttcctcagcctcctccggggctcctggggggttctcagtggtacccttccagctactgggggaggggagcggcaagggtgacgggggctctgaggtgccctcccaggcctgtggtgcagtcttgtctctggagaggaacaggaccaatgatggcgatgcagatgcaatagcgcctgcctggggcagccaggccactctgtggggcagggttctaggaagacgcaggcctgctgagcaggtgtctgggcctgtgcctccccactcaccccagactccgaagccgcttcacttcttccttcaggatcttgttttcctctctcagcccattcatctcattggctgcaaagagtattggcagtgagagtggtagtggagcaggggggggggacagggattcccgaggtctcaggaaagccctccttgtcttgctctagcctggcacattgcaggagggatagtgttaagtaagccccagtctgaggtttgcagaatggatgaaacctgtaccccagcttgtgcctagagctcccccccaggaaggtcaggttagtggggataccccagcctaggagaagagacacaggctaacaggggcctcctcccatgtgactgggaaccagagtgtatcacatctctttctttcccagtggctctatgtgggctgggctggccctggggttcttggactgtgggtgtggctcactgaggatgcagagatgctgcaggctctgcaggtgtgcattttccagttccagctgcttcttcctggccagctcctgggtgaccatgcatcgatcgcacaagccagcccgcagcctagggacaagagaagccatgctgaggcagacactctggatccttcaggccccattgctaggatgtgtcctgcctttcccaactgtgttccatggagtcccaggcctgcctcctgctgagggctcagcagcccactgtaattgtgtttggaaagggatcttgcaaaggaggttggttctcttaaggttctgcacagtcctgcagtggagactctggtttggtctgtgctgaaggcgctcggttgacgctgggagagctccctcacctgttctccagcactcgcaggttctccttcagtgccttctgctgctcccggagctggtgattcttggcaaagagctcctctactctctgtgcatctctgtgtggcaaacggctgaggtgggttgctggtcgtggtgcccagcgtggcctgggtttggtgctcctcctgggcagctccctgtggggacctgtctaggcttttctttgtgttaccttagctatggcatgtatgaactttggtctagttcagctactcttaacctgtgggttatgacccctttggggtgttgaataaccttttcacacgggtctcctaagaccattggaaaacacaggtatttacattacaatccataacagtaacaaaattacagttatatgaagtagcaacaaaaataactttatggttgggggtcacctcaaaatgaggaattctattaaagggttgcagcatttggaaggttgagaaccactggtctagtcagagatggtctagacacaggagagtgacatacaggccaaccacagcaattgaggccacgtgttggacctcacaaatgctgtcactgctgctttagtctcccttggttcccaagtggagggccatgtcagaccgcttgagactgatgtctcaatggtctgtcacttgagtagtatgtcaccttggccaagggactcgctgccccctccctgccatgctaaacctcagtttcccttcttcatttgggacactgggtgagctgccatcctgggacctcatgggcagtgttggtgactatggcttgtggggatagctgccctcccatctgctcctctggctgggctgggctcactcaccggcaccgttctgagttcagttctagaagcttgttctgcagacctggcagagaggacagagaaagtgcaagtcaggccccgcccagctgccccctcacagccggggtagggctgaggcgggccatggaaactcttgccctggttagcatctccagacccctgatatccgcctgactcttggaagcagaccctgggaaaggtgtggagaggacaccccatctacacctctgcccagatgtcctggtttcctgagctgtggcctgggactctagcttagcatctgattagaggttggttctaaaagtggctggccatctggaggggcagagtatccaagaggggctactttttgaggggtagggaagggaagctacatacacccttaacttctcctggacctgtctattgggtgcataggatgggttgggtagatctggtacctgtcttttcctacttgttaggttctctttagtcttcaaatcaacataatctcttgggggtggggctagccatctactctctcagcagctgcaagttcttagcccctggggttcagaagcctctgcccttccctgagttcctgtgtacccagccaagtccattaggtataatgagggttgcctgccagcccaaaccaattgccaaaaaaggtccactcctctgttagggagtggcctagtctcctcttggtcagtgctgactccaagtctcccaagctcaaatcctattaaccctagcttgaatccccaagtgcacccagtaggcatttttttttttctgttgcttctggaacattccccataacactagctgtgtgatctataggctttcagagcaagtcccacgagacccttctctcattgacacagttctttgggagccagtgaggctgaccccaaccagggtaggtccagggattctgaggaagacttcttctctgaggcttgggggagtgtcttgcttctttgaccttcatgtggccctttccaaaggccaccaaggtctgaactgtaatcgcagtgaagtgggtcaagggaactctgaccagtgaggaacttatcaggggctggagggaaggaggaggtctctgttcaggatcaaagacactttatatggccttaggaccctctagagtgagcgacctctccctctgggttatgagctattaggctagacctgccagccttctgacaggacacagcagggacatgcttgggggctggatgtagcttgtggtcatgaggtgttgctagtgacccctcaacatgcccctctcctgatccacaccatagggcatggtctaaagatattctgggtaagggggtctaggctgggcatccgaatgctttgcagcttgtgttctccagtcaaggttctgttctccagacagactccctgtgctttagagaggatacttggaagttccctgacaggctaagacccccaagaccactttcctatgagcacaatgttcactcacccaggacctctttctcatgggcttccttcagcctgttcagcgactccatgaagctatccatgactccttgtacgatggccacactgcactggctgtgaggaggcctgggacctctactgcccttctgtgtccagcctgcagagaggggagtgggaagagggttggtttaggtaggggctatagtctggaaggtatgtaaactttacacacgtggggcacatctgctccctgtgaggggctgttggggggagaggcagagagtgaacggataaaggctggggatgaaatgattaatactagaatatgcatggggtcagagaattgggtataagccttggcttctggaggctgggctaggggtggggaaaagagacagttggggatcctgaagtataatgaattccacttcacacagtggctcccgtggccacaggaactcactgagcaaagacagctacacctatggaacgaggagagaaaccaggaaggagatgagctcccagactggttttacagactcacctggcgttcaattgccccatagctggctacagtggtagaggtgacagttggtggctctgtgtttggtgggtgagcaatgtgggaatgaagaattgggagactaaccaccccaaggctgagggccccagtcttagcttacgggactctagttgcctttttctctcttgatttcaatacagttatcactttcaacagaaccatctaattctcaaaacatctcaagggatttctctcctagtgggagatctaaggttcaaagagattccatctccatctttttcactgggggtcgggggaagtagatttgaattcagaccttgctcattcacccggtgtgagcctgggatgttttccattgggcctgtatgctcagctgtgtaggctctaccttgctaaaggcccagagggtgaaaccagctggctgggacaaacagggctaggaaggggctgagccgagacacctgtaattccacccagacttgcccaacgggtggctcttcccaggctcctagcacctgctctatggactgaagcaactcttgcaagggatcctgaggtgcctgtaggcttgggagatacctatttgggatctgggtccatatgctgccttcattgtgcattgcggcccatctttaagcacacggcttggctgtgactctcaaggtcccgagggcaatcttgcattttctgctgttcactggcttagttccctcagatgtagatggtgcatgcatcctacccagggacccatggccacgacaagaccaagcaagattgtcctgttgcatattgggtaacagtgctgtaaaccgacagcagatacatatgactcagatgaagtagaccctaccatgcctgggtctagctcccaccagtctggagtgttgggggtttaggcagcgaaaggaaatggaggctctgtgagtctaggctagagatggtgaccagcagcttgggaatgaagggaactctgcaggtgagtgtgggtccttttagaagccaaggctgtattttgcatccaggtgtaaggagctatgaaggggaccaagcctacaagagtaagtcttggtgccaccttaaatccagaagggtgatacccaggagagtgtgagggtttggacctgtgaggtgatgggagtgagctgagacctcagggtcctcaagagggcaaggggacccctcactctcgacatccaggctggaaggtctgtgaggcaccgcattctcaggaaggaggggctgagggacaaggctgctggatcggcctctgctccatttgttgctgctccttgggcagttgaggaggcaagtacaaagttgggagcagctgccacctacacagaccttcaggcctactgttgcctccctttgtctgtgaggagtcaaagctgccgagaggaaggaggctggatgtgaggtatggcttctgtgtggacaggtggagtgctcctcagaccaactcagtgcagttcccgggaaccaaatagagcatgcccctgagttgagcgcctcccctgtcagagcctaggagagagagcgcagcaaggaagcctgagggacagcagaagccttctgtcacagtcctcacagggaagacacacagtaagctctacctgcttcccaggaagcctacttgaacctcaggttccctcccgttcctgcccctcccagtccctcacttgctccaaggatccttacacatctcaagggcccctatttgcaactcggggtccccatctacctcctaggccacccatgtgcttcgtgaggcctccagtactgcaagggcccttactttcctctcaggagccctacctgaacctcagatccccccacacctgttcaatggggcccctatctgttctgtagagctcccacctgattctcagggtccccacctgctcctcagtctcacctgcctccaagagagcccacctgaacctcagacccttcacctgccccccacagctccccttgagtggcctctgagaagaggcagggattttccagtcagtcagcaggtcagcaggctgaggtccccgaggagagctcctacctcagccccgagtgctggcctgggctttgaataggcttcttgtccttcttagtcttgggtcagttgctttaccccctgagcccatgtttcctcatctgggggtaatgacgcaccctgtcctatactgagttttctgtgagactgactctcactagtattaaatggtccaggcagaaggcaggtggcacaaactctgtgtgtgacagagggaaccctgaacctcttatctccctcacgtatagacccctggcagctaacagtgccctccctcattatgaccaaccggaatctcacaaacaaaaagaccttttttgggaagtcagatccattcccgagtttagagaagaggcctgtcatcaacagtggtcacaaagtgcttactagtccatgggtcttggtgaccattcccagggaaggtgccatccattccttatagataaagactcatggtcccatctgtggctcccagtaagactagtgtcatttggcccagtggcaaagcccaagtgttaggtcagtggccatatctgggtgttgttctctggggcagctggagccctggactcctcctgttgactggccatgtcactggtgggtaatggcagctgacttcattccctctcaggagtgctaagtcagaggaggccaatgacagccaccctgtctgattgtccttaatgcctagccccctgtcttttatcaggccctcaagggacgaggactctcagcagacctggttttgtgtctttaaggatggtctgatggtctggtctattcatctagaccagatgtggcctacgtagccacaaaagtcagcattgaccacagcggtggtaacagcagcagttgctgttgcacattgtacctctgtacctatatttcactagggattttctggctcaggcaagctaacatcgtcccagcgtttagccaaggaagccaagctgttacttggcctaccttggcagggccaagcaacaccaccagaacgtggttggagcccatttgaccttggaggatgtactgagcatctcatgctatggaatcagcctgcaggcatggggcagaccagaggcaagaaggcagaagctggatttgaaccaaccagagtctagctggtccatctcatctcattctctgtgtgggatgctgctgtgacggacaaagcatcccacagtggtttcagacaagctacttgtctggttgtgccttggttttcccattcataaatctggtagtggtgactggggaggcagaaggagcctggtatgtagcgggagcttccatgtgtgctccagagagggctgggcagggaacacagtgcttctaacccatgtgttcccacatctcatcatggtcacccatagaagctcctatttgatagagacttgagatcagaaatgttatatatctacaatcaccagctcacacgagatatggcctagacacaaaaagacctcctagcaaccgctttggtcagtcgggtggtgggctttatcgagagacgctttcttggtggctttggatctctctgatacataggccccgatagacaggcagccaccacagacagaacaacgctttcagtttgagaaacccacatctgagtccatgcccaaagtaaacgcctttgcacaagttcagcccatccccccgccacgcacaccccttgcacggggttaaggatggctgtgtacacacaggcaggtgggcacgaacatttgcacgccccatgcttgtgcgcacactgcctaccagggcacaagtaaaaaaataaggcagcttaggtaacaggtcaggtaacagagggccctgcaacctgactcccgccttccaggcctgggggcgggggacggaataggctagtgattgatcttactgtctcccaatgcctgctgaagtacttagagccactgcctcaatcttagggcctgacaatgtccccaggcatgctctgagctatgggtggctggacctggctttgtgctcctttcttttccgtggctgcaaagtctctggacccacaaggaaggggacagtgagtgatccaagacacagtgctggccaccagcctatttctaggtcctggaaccccttgcagagatgggggccacagtgtcatacctggctttgcttttgctgcacccaaattgctgcccaggaaatccttgagtcttcctcctccttgcttggtccccaggaccaggcatcaggtagtcctccataccacacacagtgaaggcaggccagcctgcctgtccctgcctcccgcctcccaggctttctgcttcctgtctccggcctcctgctatgaagcctgagctgggtctctagcccccttggtgagcaccccaacgactccagtccacccggctcctggaagggccctgtctgctgtaatcgtgtactcacatggccacttggccagccttggacctccaggggcctcggtcctcagtgatccccacccgggagagataggagcgagcagtatgaacttgcaagacagaattttgaccaaacccgcctgacaggtttccgattctcccagccgggagctgcaaggaggcagggactgactaaagccgccagactggtctggccatctctgggagagtggaagaaccggctggccatgtgcatagagctgaattgtttctccctaatccgagccgcctgggtgcctcagcttgaccatctccgcagcatcctgtgtgactctggacaggagtactggccagcccagagcacaggcaggctgtgtgggcctttatgaaggaaggggagatgctgttggccttgccactcgggagtcagatgtttagaggacccttatgctatctacatccagcttgccttgggttgaccttgagcaggtgaagttttcctgtctaacctttatatttttagtctgcggccagaatgacattggatagatagagttcaatagtcctgactttgtggattaaacaaacaaaacaaaacaaaacaaaacaaaacaaaacaaaacaaaacaaaacacccagggtgtgagcctctggagactactatttagagacatcactgggtctggggctctgcagtacccattgtggccttcctgagacagacagctggcttctgctcattggtagaggtggttaggggctaagcctcaggttgtgggtatcacagtggatgggcatctctggatttcaggatgaccctgatgagtagaaccatggcgtgacacatagggcaggggctggcttggacagtgacattgtggctgcactcctgcaggaaacagagtcctctgaggctatggatgccctgcccccttctctctctcgctcacgtgcctttcaacatctcttactccagcttgcctgactctgcccagaagcaagcaggctccctcgctcacacacggagccacagaaggtaggtaatgagggtctgtagagcaaccacgttgactaggagaggaggaagtcttgggtcttgaaggatagaagacttcctgctgctggcagctggccctgagcttagggtgagaatggatggtcttaggtaaggatgactgtctaggctccaggaagaggaagattttaggctatagagcactagagacacattgcatattctttaccttctgtctggacctttgtgagaggtgtctgcctgctcagcacgtgtgtatctgttcgttgcatgggctccacaggagggagagggcatgttccctgtgggctcagcctgagagaaaggggacttgtgtgcaagtagacagaggctttgcctgtttttggctaatgtctgaagtgcacccccccctcccccaatatgttgacttcttaacaccgaggctgtagtacttggggacttgggtggcaatcgggacataaaggacagagccccatgaatagcaccagtgctcttacagagagcagagagctctgccccactttgccaggtgacacagacagaaggttgtcatcagatctgcttttggactttcttcatccaagaccacgagaggtatacctttgtcttctgtcggccctagcctaagacattgtgcagcagcccctggctcagccaggtctggtgcacaagtcttggcatttgaaagcagctggctgtagttcctcagctcgtgactgttcgataggtgctatgttgtgctatgtgtatggactttttctgatgtgtgtggcagggtctacaggctagaggctttgtgtatctgtctaggggactgtacatacattcctgggggctgtgcgtgcatgcctagaggttgaatgtgcatgtctagaggctgtgtatgcatgccttgggactgtgtgtgcgcatgcctggggatgtgtgtacatgccctggtgtgtgtacacaggtctggtgaattctctgtggggaggaaaagccacatgcttcatgccagcagtgtaggcttatctctcgaccagagctgaagtttggaccctgcaattctgtcccgtttccttggtccccaggtcctgccccagccagttgaatcctagctcttctgtgacttgggtcacaatctctccgggccagggacttgtctgcacagtatgctttgtaggcagctcagaaggaaccctgaggtgaggttgcagctaaagcttttgccagggtctacctcagtaggcactcagctgtgagaccctgcttggggcttgatggataaacagggaagtggtgttaaccagtgttaacctgtcagtaacttaacagagactgctttctcagaggtcagttcacacacactggctctgcagcccagcagccagactgatgtcctggcagctgtatttatttataaccaattgcaactgggctggccagggaataaacaacggagccaagctctgaaatggaaaactcctcgctgatccagaggctgggttctgatgtccatgcctctgctccacgtgagatggcgcagactaggtggtagagaacaggatttcctcagacaagcagcccaggaactggcttcttgggtgatgggactgtcaggttcttggttgtggttgtgggtggactcatctgggcatattcatcctgtaattaaacactattggcttagtttaatacaactggactttaatggctgaattttctttttcttttctttttttttttttttttttaattgtgttgggggtagaacccagggccttatacatgctggtctgtggttctgcatcctctgttttcttcctctcagcatgtccaaatgcagcacactgggctggaaggatgaagtggagtctgggccaggcaggatcctggtctggctgggagtgaggtggtgggtcagatggaggggtgtgtgtgtgtgtgggatgggggataggggtggtaggggtagagggtgggaagtagggggtgggagtagggggtggtgtggtgggggggtagggggtagtaggtgggggtagagggtggggaggggagaaggccttttcctgggatctttcaggcaaaggccttctctgagattttcaatgaaacggctctctgagacgaccttagcttgtgcgtatttctttattggggtgggcatgtacccatacactttatttggggtgagacaagggttatatagttttgggaaagggggtgagggtgtggtcaaaggtcattgagtgaagactaaggcactgagttgcctcattagcatggggaggcatttcaggaatcccaggtggaggactgcaccacattcctcaggtggtgtcccggatcctccagagaagtggaagcccggaggacaaagggagtccgagctcagggctgtccgtaatgtcaaacttccaccttggcagcagggtttccctacactggtccaccactaaagctacattcccagctcttaaaaaaaacaaacggaggagctgggcgtacgaagctcagttgtagagtgcttgtacatccatgaagccctggcttaatgcccagcagtacagaaaaccaagtgtagtggtgcaagcctccatgagtttgaggccagcctgggctacagaagaccatgtctcaaaagaaatatttttttattttttaaatttgagactgggtgtagctcaggctagtcctgaacttttccactgggattacaggtgtgcaccaggcctaaattggtctccccccttgcctcccttcctccctcccttcttttgttttctccctgcccccttccttctctttccttcctcccccccacccccctgacccttttccttttttgttgagaaggagccctgctatgtggtctaagttggttttaaactcctgaaatcaagtgatcttaagaactccttactacaggtgtacaccatcatatgaactaataaaatcaggctttaaaaaattagtaaagagggccaacgggagcaagtggggttgacaggagtgggcaggactgaccggattgagcaaccttcattcccagcaactacacgatggcttacaactatcagtacagctacagtgtacccatatacatttaacaaacaaacaggctaagggttgtggctcggttggaagagtgcctgcctagcatgcattaaaccctaggtttgattctgggcactgcgtaaactgcgtggtggatcatgtctttaatctcacttcttaggaggtagaggcaggaggatcagaaactgggcgtcatccttgattacacagatagtttgagaccagcctagcatacatgaagccctgactcgaggaacatatagagctacattttagagtagtgctagggtcttagcaaacacagcctcctccactcagactttctccctccagtggtccttgtcataccggagccaacatctactcactgtgaccttgttagcaactaagttggggagggtggtacttagggacaggacacggaattgtatatattcagccgcccacctcacctactggtgacatccatctggatcctaacatcaccaagggacctttgaccccttctcctgtggtcatgtttggattgggtgttggagagcatcatcgtggtaccctttgtcctcaccagctttgctggaatggttgccatggtgacagtgatgctaacaactgccttggtccagctttgctgaaggccaagtgatatcccccataaaccttttctgatttacaggtgggaaaactgaggccagtgaagtgccttccccaaggaccctcccttatgtgagggggccctggaatgaatggtgggagcatcgtgaaggtatacccacagctcacaagccgcaaggcggggtcaggcctaggactctagttctattcttattgctcactgagtccttttgtcaaacttgcttcactctccctggctcccagtctgcctggagctgctggtctggagcccaccagaggctgtggaggtggagcagatggtggggcagtcctgtagcctctgagtggatgaggtttgtttcagagcctcggagctggtaggtatactgctagtcccaccagaccctctccctcttctcagtgacctggaactatttaaggcttaactcctcttggtaaccttcagggcagaggccatttgatgtccagcctagttgactatgtggctgatgaggtctctagcatcatggctgtctttttgtttgtttgtttgttttgagacagggtttctctgtatagccctggctgtcctgaaactcactttgtagaccaggctggccttgaactcagaaatccgcctgcctctgtctcccaagtgctgggattaaaggcgtgcgccaccatgcctggcttttttttttttttttttttagatggctgtcttagttagggtttctattgctgtgatgagacaccatgaccaaaaagcaagttggggaggaaaggttgtttgttgtttggttttttttgtttgtttttttgttttttatttgatttttgtttgtgagacagggtttctctgtgtagtcctggctgtcctggaacacactctgtagaccaggctggccttgaactcagaaatccgcctgcctctgcctcccaaatgctgggattaaaggtgtgtgccaccacgcctggcttttttgtttgtttgtttgtttgtttttggtttttcgagacagggtttctctgtatagtcctggctgtcctagaactcgctctgtagaccaggctggcctcgaactcagaaatttgcctgcctctgcctcccaagtgctgggattaaaggcgtgtgccaccaccgcctggcctgtttgtttgttttttaaagatttatttatttatcttatgtataagtacactgtcactctcttcagacacaccagaagagggcatcagatcccattacagatggttgtgagccaccatgtagttgttgggacttgaactcaggacctctggaagagcagtcagtgctcttaactgctgagccatccctccagccccaagggaagggcttatttggctcaacttccacatcattcttcatcatcaatggatgaaagtcaggacaagaactcaagcaggacaggaacctgaaggcagaagctgaggcagaagtggtggagggtgctacttactagtttggttcccctggctttctcagcctgctttcttaaagaacccaggacaaccagcccaggaatagaaccatccacaatgggctggggcctcccccatcaataagtaattaaaaatgccttacagccagattttatgggggcattttctcaattaaagttctctccttttggataactctagtttgtgtgtcaaattgacataagaccagccagcgtgacttgctcagttgttagcatgaactcctcctgtgcctatacgaagcaccaaccctctctgagcactcaggttagtggatgcctcaccagacccttcacccttcctgggtgactttgagcaaaacctgaaacctgtggagcgggaagatgctgtggagtcagaagttgccgtggcggtaaggcctgcaggaagtattcttggaagtgggctggtccaggaggccaagctctcctcactgccttaggacttgaagaggctttgcttgctgttctgagaaagtgtgaaacttacgatgtctcaggggtcttttgcattggaaagtgtgtgtaggaacccctaacccacagcttcttattccttgcccctttccatattccgggcaagctggagccagagaagtccagtgcctcctatcctctggaaagggcctctttcatatttactatgtccacccaagatctgagcaggctctagacacctcgcatctattcatgaacctatccacacatccatccatccacccatgtgtcaggagatggctggttctaggatacaatgttgtgcagtgttggggcaaagcattggtcctgacagagcacaaggtctgactacagtacacatgctgtgtgttggagtgcataataccccccttaccccatgtattctctttatgtacacactcatgtacatagtccttgatagtttgaattgtcaatgacagagcctagagccaaccgagaagggagcctcaattgagaggttgcctaaatcagattagcctatgggggattgttttgattataatgaaatctcagattattgtaggtggcactgttaactgggaaggcggtcctgggctgtttgtataacagctatcatgaacgtgtgaatgagagagcaagcaacatccttcaagttcttgctctgacttccctcaaggatagactgtgacctggaagtataaactaaataagccctttctttcctcaacacaaaggaaactagaacatacttagttacggttgtagattggattttactgctgtgaacagacaccatggcaagtcttataaaggaccacatttaattgggaccacttacatgttcagagattcagtctatcaccatcaaggcaggagcatggcagcatctaggcaggcatggcacaggaggtgctgagagttctacattttcatctgagggctgctagcagaatactggctttcaggcagctaggataagggtcttaaagcccacacccaaagtgacacacctactccaacaaggctacactctctaatagtgccactccctgagccaagcatatacaaacctttgtgcatacaacatatccccttactcctgggggtggtgtaagaggggccacataggggagctgtgtgtgaggttgatcctcaccagcttcccccttgatttccattttttaaaaagatttgtttatttattatatgtaagtacactgaaactgtcttcagacactttcttctcactccggccctgctcgctcactgtagctgtcttcagacaccccagaagagagcatcagatttcattatggatggttgtgagctatcatgttgttgctgggatttgaactcacgaccttcggaagagcagtcaatgcttttaaccgctgagccatctctccagcccccaatttttttttttaaattaaaacttatggtctggacaaatgactcagcagttaggatacagggtgcctttctctgggttcaattcctagcactcacatggtggctcttgaacaaccacctgtaactctagtcccttgggccctgtgattaccaggcacacacatggcacacaagtacacatgcagtgaaaacagccacacacattaagtaaacgaattataaaaacttgcaaataaaactatttttcatcatcatcattattattattattattactatcttgtggttctggggattgaacccagaaccttgtacatgtcaaacaactactgagatacacccctaggtcttttctcattttaagatagaatcttgttaagttgtttgagctggcctcatttgtttaatttggattttggtttgggtgatattgggatggactctagagactctcacaccctaggctgtgtgctctaccactgagctacatttctaggtccagccttgaacttggagttctcctgcctcagcctggttctctctcctatcagttacaattaggaactagatgcttgagatgtcacatgcagtcggatgttgtcccctccatgtctatctgcagaagctggtaaagggcggggctgtggagttcaggtcctacaagattggagggttccatggccttcctggaggataagctaggtggaccgtgtctcccggaggagagggcagtgtgagtcttcagggacacaggccagtccacgggaacagcggctacatgtgaagaggccctgagtgtacggatgggaaaatctccattttccagactgagagaggggtgtgacccatttcctctgtgcctagctgttccttagagcccaggcttgaatttaggattaggatactgaggcaggcatcatgggtggttgtggtgagtactagtgtaggctaccctctgtcctgtagtcataggatcacactgagtatgctcactggtatctgtttacagcctgctactattggtactgtgtgcagactggggcaggtgtggggttccctctactgagctctcactgtatgccttctggggatagggttggtgtgccttctactgactgcccactgcgtggagactggggcaagggtagtgtgtccttgttgcacgtagtttctctttacctgcctttggtctgggattggcctcactaccagccccccaaccggcttctcttgaatccttggacaaaagacacatacacagttgttcatgttcaacttgccttcttggcataattgctgggcgctactatctcccacctggaaaagcatgcccttaccaatttcttatctttgcttctcccacctgccctaaactttagtggctcagtgacatctacgccctgctaaatgcccctggtcacctgactacaggagtggcctgtgtggccagtctgttatgaaacatcatatggctggtcaacttttcttcatcagatatgtctctctccccctgcgtctctctgattgcctccagggacccggaagtactgcctatccattccgcccagcaattggcccatggctttctttactgacagatcaagaaccaattggggaataggaccttagcataaaaaaccacccctacatgttcttactgagtgcccactgtgtgcagactggaggtgaggaatggggtgacattgctgagtgcccactgtgtgcagactggaggtgaggaatggggtgacattgctgagtgcccactgtgtgcaggccaggaaggcaccatgagattcttctttaggagctcatacaaaaaaacaaaaaaaccaaaccaaaacaaacaaacaaacaaacaaacaaaaaaaaaaaaaaaaccagccaaccaaccaaccaaaaaaggttgtccattctggctacgccagcttgtggaagtgcttggggtattggttgaggcagcttcagggtgcctttggtggcgtgtagggcagattacgtataatcaaattgaagcagagaacaggaatagatgtacaaagaaccaggggatgatgtggggagacagtattgggaccccaaggttggaggaataggataacagggatgaacagaaagggggaaggaaagaaaggtggcccctctggccactgctcctctgctctgttgagttggatctcaaacttcctcctctttcttgctctcccccttcctcctcctgttcttcttcccacctcctcttgtgctagaaattgaatccagggcatcaggcattcaaggcaaccacactacaaactaagccacacccccagccacatcactgatgtcctacaagattttatttctggctctggacaccgaatgaccactgaaactgctcttatcttcatgctcaggaaactttttttgcccttttaatttcctgtgatttggtgtttgctgcatgcatgtctgagtgaggctattggattccctggatctggagccacagaaacttgtgagctgccatgtgggtgctggggattcccaggtcctctggaagagcagtcagtgctcttaactgctgagtcatctctccggcccttcaggacacttttgacagttagaattagcatgtagagtatgttccgggtaagttccagtatactcatctgtgaccctctttgaaggctgagatcagcatcctttgttaatgcatccaatcagcaggtgaggcagcacagcatcagagtctgggcagctctggggcccttgtctgtagctggagagtaagtcagagtgggcaggtggtccaagtttcagagaacgtaggcgacccctggcccaaggagggatcctctgacctctgctgatgcttaagacaccaaggctactgcccctgaagctctcatggccccagcctgacttccagagccaattgggggcagaaagcccagcccagaggtgaggcggccctgggcttttatccttgagcagggagggctaaagataaggcttcaaagacagctgcctgtaagcacacctttaaaagctgccgggccactgatgtttgtgttagtggactaatagataagaggttgggtgggctgccagtaccaagccagcccagccctgtagccctagccccccagataaatgtgtcacctattaatatggccccggaggagggcctctgtctctatcctcctgcagacgcttctggtggcttgtgtgggaggggcaggggcagggactttctcatggcagctagctacatatccaacaggagacacacatcgctggggaggccactggaaggagaggcatctttctctctcatctgccctccacatgcctctatctcagtacccatttttatggctactttttgataacacaggctttgtaaggatggtcctttttgccaagcactgaagctgagtaagaccaaagcctccttttattgtccctcttgtctcctgccagggctccctctgcttgggatgagctttctagaaccttctctgccagcatagcccctctagcacgaaccattcagagatggtcttgggtctacctgcagtcacctttcccttgacacctaactagaccttgcctatttgtggatctacctgccctgggcatttcacctaaatattctggtctctttttgtgctcagcagggctgccctccatctcagggctaaagacactgcttgtgggtagcataatattctcactccattattggttgttgctgtcagaagggctgttatgactaggcttggtggtgtacacctttaatctcagcacttgggaggaggaggtaggtagagctccatgggttcgaggccagcctggtctagtctgcatagagcattgtaggcctgccagggtaacaaagtgagatcttgtcccagaagaagaaaaagaaaggcttttgtggctatcagaggataactggacagctcaggccgtcattgatctcttatctcggcattctgggggctgaggccgcaggtatgtgccaccaggagacttgtgggcagggatgaacattttttttggggtgaatgtttgttttcatttatttgccttggtacaaacacaaacttaggtgtggacatgatgtgtcatggtggccctatgcttaatttttgaggaaccatcaagaggctaaagttttatttcttttcttgtggtacttgtcaatgaactcagggcctcccacatgttaggcaagggctccaccactgagccacatacccagccctctcaaataaaaggatcttttaaaaatatgtattttattatttttaaaaattatgtgtatatttgtggtgggtatgtatatgcaagtgccctctgagaccagaggtgtctggttttcctgctgctggactcacaggtggttgtgtgtgagctgtctgacatgggtactgggcacagagtccaagtcctctgcaagagcagtatgtgttcttgatatttttaagatttatttattttatttatatgagtacaccgttgctgtcttcagacccaccagaagagggcattaaatctgactacagatggttgtgagccaccatgtggttgctgaaaattgaactcaggatctctggaagaacaatcagtgctctgaaccgctgagccatctctccagcccccacagtatgtgttcttaactactatttcttaaccactgagctctctctccagctcccaggatggagaataatcggactcctcggtggcttaattgtatggctgagaacgctcagcagtctttaggggtctgcctagagacctctgggatggcagaaaaatttgtgaatccacacttatctaaaaatattcaattgatatacaagtatgaacatatgcttataatccagtacttggaaagtggaggcaggtggataggaatttaataccagtctctgatacacagtaagtctgagtccagtttgtgtcgtatgacactgtttcaaaaaccaaaaacaaacaaaaagaagtaaaaatgtttaaatggctggtatttttcttggttgctaaggttttggaatcccaaccttttttatctttttgaattttagagacagggtttctctgtgtagccctggctgtcctggaacatgctctgtagaccaggctggcctcgaactcagagatccacctgcctctgcctaccaaatgctgggattaaaggtgtacacaactatgcctggctaagtctggcccaagtcttagctctggcaagacccgcgccagctgtatccagtctgacccttcctgtcttggctttttggctatatttctggagatcccagtatgctgggctgacttttcttgcctggggctcaggggttggggcaaaccatagatggttcagtcacatttggcctctgtagtttcagttgctgacaaggcagtagagaggaatgctcctggacagtgttgggtcacaggaagaacatcctgggctaggcaaactctttccctagcagcttcttctgttcctaactagtcgaggccagactagttagtctgttatctaacagaggggaagggggctgagggataacatcggcaggtaatatggcagcctttctgggcagagttctgggcctccttgtggactcaactctgggaagcgcggacttgtttttctgctcctttgtcccctggcctggggctgtgatggcagggctcccaggcttgtgtgtctgcctagagtggcctcagcttcctggagttggaggaacttaatgagcttgtgatgggaactgtaaatgactgtcggtcaggataacttgatctgtgactttggaggagggcagtcggaggggacaaggaggtgttagtgacaagcgagcagatcctaggactgggccgggctgtctgctggcacgtcacagatagtaaaactgcactgccctgccatgcacgcagagacggcgtcagacccagatgttgtaactaatgctgcgtggcaagggtctggtgtcagcaggccatggtccaggcaccaaggatcccgagcacatcataaagatacattaatggtctgcgtgtctttagagaaatactaatgttgttttatgagaaacaagagttgaaaatattaaagtcagaattttatggcctaaaaacaattaaacaatggagatatgggaagggagaagttgtctttgtccttgggtctcagtgccctggatgggatgtggggtgtggtctcccctctgatgaccctctcgatgaagttcaaactcccacggaaatgttctcttggggttgtctggaaagcagaggtgtgggatacataggtatattgtgataatggggctggtgtgggcaagtactaggacatccttgggcaggagagtgcaccacaggagcagaactccttaaaaacctggctctcgcaggttagagtgactactgggggtgggggcagtggggaggaggggcgctcttttttgctctttccagtgggaaggtctatttgccatatgctccttgtctgaggacgtttattttatcctaaggttttatcatcaggattagcttgagtgaccctgcttgaaaggaacaaatttgtcttgagaggcactgcctatgagcagagtcctggcagggcaccgcagccacagccctgccttgagggcctttccagagctcttgatactctgttctgggagagaggggtctttctgctctgggaactgctggctggctgcagttactggagcccggtgtctttgctctatgtggaatctatacaggagaaaggtggatcccatgaggtctgttctcagctctctctgggccatgatgaggagcccaggggtgtgtgcacatgagggttaagcattgccaaaacttgcaagtcacttgatcaagtgttttatgtatgtgggtttttgggatgcacttctgtcacacaccagaagagggcatcagatcgcgtgagtctagttacatcagctttggagcatccctttgagtgctgggaattgaacttaggacctcaagaagaacagtcggtggcatttactacattctcaagttctgactccacctctggctgtttgcaaacactccattacaccaaagagagagtggagacttttcaatagttgctccccactccctcctactcctggtttacctctctgaattcttcatgtgactaaaattgttcagcatgagctactgggttttggcttctttttcttggcaccatgtttctgggctcacacttggctgtgtgaagtgctctgactgtctactcctctctccaagggtgtgagggtcatctccacttcggtggggtgaacatcaggtatgagagttgagtggttacctgctttcagttcttctggtgtttcgagcaggatttaagactttccttctctccctcttcccagaatcctcttcaccatagcaatctttgcctggtgacaggcatggtaaatgatttatagtgtgtcagacctggtctgaagtgattaggtacaaatgttaggcatacggctttttttcccctctccatagatgtgaccactgcacagctaatctgcatctccttggacctcatagaaaactgcactctcttgcagcttcttctccctgctttctgatcaggacgctattgagtgttgtttctgtttatggctgaatagtattccctcttgtcagtgagcagtcacttatctggtgaaccctgtgaggatgagccatggtgcctcacctgaccggtggtgggtgtacaagttgtttctttccggtcactatgagtagagtttgcatagacatctgtgcacagggcttttgtgggtatgagttttctttagaggagggtaagtctgtagccacaggcagggcggctcctcagaatgacatagtgaagtgccttttggcagtgacatcatccaccttcctgccagagagcaggagagcactggctgcttttctgccacctgatacttcctgtcagctcttagccattcctgtaggtgtttgtcccaatgtaaagccagaaaacagactctgagtggtaaagtgagctgtctgagactttacagcagccaagcaatgccagtgctcctcagcagctgtgtctcaggccaggctatctatgctagcaattgtgccgtgggaccccctgcctaccactgctcctacagctctagtgtcccctgctgtctgatgactctctgtgccttgtcttcactctgatttttctgttctgtcctctccccagggcctttgcacatgctggccactcctattcactcttcaggaacaacacacttggaccatgtgtttctttggcattcgtgaagaaaaactcttacaagatgacagcaagggtcaggatctagctttctgtaagggctgggcgggacagatgccatgtctatctgattggctgtgaggtcttccttggagtccatctggtgacatggggcacagcataggcccttcacttgccctcagcatcctctctaggactggcaggaaagccaagcatctacctgaaacagaggtgtcactgccaggaccctccaaagcccagaggagctagacattgactgagctcagtgaaactttgaaagtttgaaaccatgaagcctgggaatgagggagtatcccatactcttggaccaggtgctggggtttttgcaggacctagaaatgccctggcctcagcatctgctcctagagctggggaatctgggcaccctccagaatacagtccctcctctggcatggccaggctgggcttggcctgtgtggtctgcagcatctacgcttctttcccaacacgcacggttacataaacgatgataacacttcataaacatttttctaacatgcggaatgtttgacatgatttcagctatttcagaactaataaacaattgtcaatgtcatggtggacagggagcagaagccacagagcttatggaagatcaaaggctggagcaagagctcttaggagagacagggtacaggaaagaagccccacctccctcctgtccgggtgggcagggccatggggtgagcactgggtctctgagggagtcttggccaggcctggctgtgtgatgtccaaagcttctcagaggacaggcaggagggaggacttgggctggttatgtctgtgcataaccatcgaagggcatccagggtgcaggctgagagtgtgccagtgccgatgagctgctgagtgtctggccagctgcctggtctcagagcccacaactggcaccagagtgctggcagctaagccttgcagcccagcatgctgtgcaccatgacatccttttatttttggacagggtttctcggcgaagccctggctgtcctggaacttgctctgtagactatgttggcctcaaactcacaaagagacaaccatctctgtctcccaagtgatagaattaaaggtgtgcaggacctcatcagactgtgacatccttttaaaatacattcatgttctttggaaaagggtaagggccacattcctatagggctgctaggttgaggggctgctaggtcagggttgcctattagaagtctaacagttgttacatagggtagggctggaagttgccatcttcctcctcctgaggagacatagtaacggagaatgaggaaggatgggacactggcctgctcaggtaggcttccctaccctagacatgtttagtggagggtcatggggagcttgaagagtggcacagaggatgtggggcctctgtagaaaggctttggtttagtcccagcacttgggaggcagaggcaggcgaacttctgagttttagaccagcctggtctacagagtgagttccaggacagccagggctacacagagaaaccctgtctcaggaaaaaaaaaaaaagaaaagaaagaaaggaagaaagagaaagaaagaaagaaagaaaaaaaaactagaaaggctttggtttttctggctggagaggtagcaccacagtggctagggcacagtgggacagcatggggctagaatggaaactcagtgagaatcactttcactttcctgggctgatgtcaggatttccatctgcaggtcacccgagggttcagaaggaaggtgaagctccctcagttacccactccatgtcagagacggtcacacacactgatgaataccaattgttaacctggcacatgcatgctgataaggggatactcttcttcttgtgtggtccctctgggttttctgccatgggagcaattgctttctcttttatagaggaagatatggagggtctgaaagctgctgagctctgcccaaagcatctggagtaatggagcctctggcctggtgacagggaaggggtgagagtggcagcctaggaaggcctagacatgcactaacagaccagcagcatagagtctgtgggtcacttgttctccaaaggaagagagggagggagggagggagggagggagggagggagggagggagggagggagggagggcaggcagtaggcagggagacaggaaggcaggcaggggtgagtaaggtgtatatatgaagaaccctggctactgttccacagggctacggctctggcttggaagatccctctgagaagctgggcttgtgtgtccacagctgaaggtcccacttattcatgcttacagtcctgtgcttctccagctgtgcaccagctgtgctctgagcatgatgccggcttcttggggatgcaggttgggaatcctctatgtcttcaggcagccccagtcaccccaacaaggggtgaccacatctttttgtggtttcttgcctccctgaagtccatttgcatacagtatcagtatgtcccgagggagatcctatctcttgcctcttccaaatcctctgtggttcctacttgcctgggagaaacgagccaatgtgttctggacaccagcaaaccctcaacccaaccctcacttccctgcctcaacttccctggctgtcacttgtctctccagttctgagctccagcatggaaggcctgcctctctcacagctgtaccacatgtccagaacgtgactggtacccaagacatggggaagtccttggccctggcacccaagaatatgaccttatttggaaacagggtctctgcagatggaattgaggaaagatgaagtcattgtggagcctaatcaaatgtgagtgtgcccatgctgtgatgaatgggagtcccactgagacggaggtgatgggagtgctaccccaagtgtccatgagctagaagaaacagaatgaccctcctgaccctccctgatacctttgtggacagtatgactctgcctgagcaaggccctgcccacacttggatctgtctcacggccacagctgagatttctgctgactttgttaggacctcaggaacaaatgtagtcagcaaaccatttactattctgtggaggattcacgacggggaatgcagaatttctttaatgagctcctagcaatggtagttagcctcccaagtggcccagcacttcccaagacttgtctggaaggtcagcttttgtccctggccatcctgagtagggcagagcccaggtttttggtatttaattcctggtgtcggtgctgactgggtgatgttatgagatatggacctggttagcgtagcccattcacattcacatctctcaccccatatgagctcccttccttcagaatggatgacccccagattacctggcatgcctgcaagccaggatcagcctgctgctgctgagtatcatatgtatgtaaatcctctgtgcgaggatccaagattctgggactatgcctgggagcctgagatgtgcactctctctctctctctctctctctctctctctctctctctctctctctctctctctcatgtgtgtgtgtgtgtgtgtgtgtgtgtgtgcgtgtgtaatgggggcactactggtctaggggctaggagctgcttgtataagtcttagtgtagtgatgcccagtgtggtgtgtagaaagcaggagtctttgtgtttgcaagttgctcagcaggtgtgaagattagcttggtttaggtttatcaaagaagcttttggaggttcagcagctattttctagctttcagaagctgttgtttctggctgtgtgagacagaagcccggtggtcattcctggccatttgcttagtcctgttgactggttggagggtatcctacatgtctgagagctttctcaccatcctgtacaggcagtgacaagcctcctgggaccccctgagtatatgaccatgcttgtggcaagtacatacactacctagggacaatggagccaccagacagaggtcagcttggaggcaggttatgtgtgaacattgtgtgggagtctgggctcttcgcattacgctctctcccaaaattctcccagcaggaagtgaggaggtcaatgtcctgggtcaggtctgcttgctttctcttctaaactaacatgtaattatttggggacccagagaacatcctactctagaaactagaatcagaaggggcttgggtgttgttctgtgccattttcctggtgagccacaggcactagatttgagctacacaacaaataacaaaaaactttaacttccaagaagattgctgggctgtgggtccattccagacctctgtaccatcacaaggaggcctcgatctccaggacgtcatcctgggaatctcatctgtgcagctccccttaacatggtgctcataatgcaggtctgtctgggctctgcgtggtttccgtagggctggtgcccaggccccccaggtcctctggctctgcctgtgacttctgtattctgcagaagctaactgggctgaggaatccctattttccccacagccttctcccaagttccttaagctgaagtgccctggcctttctcggagctgttttatggagtagaggcacagagaggatcagtagcttgccacacagcactgctgaggagagctggggtttgaactggtggagctagtttgggttctggctcctggatacactgcacaggtccttctctgggcaacctgctgtttgaaggacccatggcgggggtcaagacttgcttgggacttaggtcttccactgtggcattctggccagtgagcaaggcactctgtgggctactcactatagaatttatcaactgattgtgagaacaggacaggtccttcccttagcaaagagcctagctttctctcctttcctctctccttcttcccctttcctgtcatatatacccatcctttgagtacttgcatgcacccagtatgccttgatgatatccagcatgcccgcttagcctagcaggtggcaggggtacagaggcattaaggagtagggtgaggtggatcttggctagggtttcctctctgcatgtgctctgctcctaactactgctcagagagcaggcacgagagcaggcccagggttctcttatcagcatggcctcccagctgccaggccaacctcctcataggaaaatatgagtctctcttccccggctgctggccagggccatcagcagacagctcagcctggcagcacagcctggcacgaccctcaccctgcctgggtggccaaagcattttggggtgctggttggaaggcctcatggaaaacccaccctatccatcactgagatgggggattgctgaggaggcctcatcttcccacatgctcatgcggccctttattttcagtggaggaatggtaacaaagaggtctgctgtccagagctcgaggtgagaagaaggccctgtctcctgcacctgagtttcaaggatagaactgagtgaagctggctcactccttcccttccccactccccagcccctttctctgcttcccggcacagcctgtactcttcatttaaccccttgacctagaccctgttcttttagctggaccagttccatcattctcacagggatagacctaagaatccagcttggcagggtatgccatttgtaactgtccttggtgtggctcagcttaccttaatcttaattctggcccaaacatgaagactgagatagacctaacccatctgggtgctgtcctcacacagcatgtgtggctgccatgggatggctggtcctgctatatggtgactcagtgtagacaatacagtggttgcatggaccggaatgacccagagatgctaaattatgtcatttgttacttcctggggagacaacaggctgagatgttttggatgtgctgggttaaaacataatgaaagattatttcttcctttttcttgatgtatgcgtatgtatgcatgtatatgtatttatgtttttggctcctcctaaggctgaggagtctgctctgaacttctgtatcctcttatgggtgtagaagcattacatgtcattacattacattatatgtctctcgtttacatagtgctctccctgacagactgtgtttaacttcccttcttacagattcctgccgcatcgaaccaggaccattccccgtctgccatgaccttgtctttccttactgtgtctgcaatgaccctgttttcagaggtcatacggaggtcctagggatttggattccaacatgttttcccttgggagagcactgttcccttgggagagcactgttcccttgggagagcactgttcccttgggagagcactgttccccagctgggggcgctgcttaagaagaatgtggagcttttaaaagtagaactttgaaggctaaactcatctcagggtttggcctagccaggttctctgattcttgtaaggaacctgtcacacacttctgccaccatgaatttagctatgccttcattactatgagaactaaataaaacccagagaaattacaaataataataattaaaaaaaactctttcctttcttacattgtttcaagtattgtgtgatataaagtaacaaatgctggggtgttacaattagagggtaattccagtgctctatagatcccaagctgcagtatcatccaggttgcacaagaagatcttatctaggggaaaattggttaggaaggactggcctgggacaagttggtgtcttagattcctacaggcttgtttcagcttatacaaacttgtcagggggtcctttgtgaggtagatgcaagggattcgtcagggagaaacaggagggtcactgggtggtgcccagtacaggagcctctggtgttgggaccagtccagcctccagatcttgtagggacacccagtgaaactctgctcccaggagcctggacaagcagatgctacacatacctataggaaaccctgctccctcttggaacccatctcttaacagtgtttctgctactgctgctgcttctctctctctctctctctctctctctctctctctctctctctctctctctctctctctttgtttttgtttttcgagacagggtttctctgtatagccctggctgatctggaactcactttgtagatcaggctgtccttgaactcagaaatctgcctgcctctgcctccggagtgctgggattaaaggcatgcgccaccacacctggcttctgctgctgctcttgaatctttgtgggattccccacaagtacagaaatgttcaagctggggagcgccacctcagagatttgcagcccttactccatgcttgtcgactcccaccttcactgtgtcttcagagccacagaccccttattatcatccctaggctttccatccctacccccacgtgtgtgtgagtgtgtgtatgtattcatgagtgtgcatgattgcatgcatgtgtgagtgtgtgtgagcttgagtgtgtgtgtgtgtgtgtgtgtgtgtgtgcatgtgtgaatgtgtgtgtgtgagtgtgcgtgtaaactttcccctggtactgtcctatggaatggaagctccagagcacaggtcggtgcccctatgtacttgtatgattgtcacctgaggagttttcagctagaggcagggctcagaaattttggatgctgggtgaatatgtgaagcatttcagctcactattctgatgttaacccattttagcagctcgtcttccttccatccactcttttcctcctcctcctcctctcccttcctcctttccccttttttctttcttttccttttttgttttttcgaacagggtttctctgtataccccagctatcttgaaacttgctctgtagaccaggctgacatcgaatgcagagatccacctgcctctgcctcctgagtgctgaaacttaaggcacatgatgacactatgcctagccttgtatcttaaccatactgaagctccaaccccagaggttggggagctacccagaattctttactgtgacgaggcttcaggcttgtcccggaaatagcagagctctgaggcacatctaactcagggtgaccctgggagtcaccctcatactggcacacagtcacccaggaaactgctatgggaattgatgggaggactctaaagcagcaggggctctacagctatatgcagcctttgctggtctacccttcttgtgggactgggaggctgggcagctctcggcacaggggcccctgaactgggcaccaaccatagcctgaatctgcctcgcatgcagtagaatgctgccctttggtttatggctgtttctttttttctctgggacctttgtactgggttccccaggcaccccacctaaggcagatgtccccaaggtcactgggtctgacttccctgtccaggaggctagggcttggtctaggaccagggtcatgcctgatgaacacttctcaggctgtatagacaaaatccatggactgaggagaaccagcattcatgggcaggcactgttgccatgagtcgcagtatctcacttccctgtgctatggaagggcagctttctagcagggttcagcctgtgtggtctccttaggtggttctgtgattcactcttgggccaggcactgaggagtggcctcctgtggctttgaacccatgtgttctacatcctttatgtacctcatgccccatgttgttctccaacatgccagtaggactggatacctaagtttgtgtcaaaggcatgcatggttgtgtgccaagctctgtgggccaggctggcttcaagagcacaatcctgaggttgaaatagaatatacaatgccacactgagctgcctccctaccctggccaggctccttgtcccacccaatcagacctccatcctgaaggtgggaatggctaccatctgctgactcttcagaaagggactcatcactatcaggatggagttagaggttaagttaccctagaggagacctagtaacccctaagagagctttgagtccaacttgttcattaacttcctgtaacgaagactgcactgtctataaagagggaacattctgggtggggaaggaagacacgatggtccctggagaatacagatatactctcaatgggacaatcattttcctgggatggggcagaagctagctccttggttggtgccatgccaatggttctcaggcctgagcttcccagtacctcatgtgagatgctctgtccccaaggctctgaagtgacactgtggtggatctgcttgtttggttggtcactgtctcctcctgttctccatatggaccacatgagcataccagttcctggatatattaaggtctgtccaccaggagtctagaggagataatcttgtggtccactttgtcagaacccagcacacttgaggttcagaatcttctgtgggtttttactctgtcccaataatccagagttcccaagccctttccactcttctcctaagctcttctgagattcagggagattcaggacctccttggagttctgtggtaaccacaggcagagaaccctggccaaccccagggcctcagcagcatttcaagcttacctaactcaaatcactcgctcttgacttcatttgtgttcctgagcccagctcctgggttctggttcttggggtttaaagcagagctggaatctaggggtcataggccatagtatagtctccaggttaaggtttcctcccaggagaggtcatacagggtcaagggagcctaagtggacctccctagctcagacttggggacagggaaggaggcagtgggaggctgtaagggcaggcagaggcatatttgagtgcagatagggcacgccagctatggaagctcttgtgactgagacaccacagctctgagaagactttcagttgggagggccagggagccctttattggtgctattactctttggaggatctatgacctttcacctttgcctgtgattagtggggccaacaggtcacctggctgccactctcagactcttgggctaggtcggtgtggtggtaactaagcagctttactgcttcctggccctcatgctaactgcccattacaggttagcaagtgctgccttcatgagtgcttagtacctgggatgttctggggttggggaccaggtagtaaggttccaaaacagtgctctgtggagcatcttctgtatgctaagcttatcagatcctggggtaatgacaaaggaacacatgggtccctgtctcctgcacttgaacctccaggaggcctgctgaaaagcagtaacgccaataacaagtggctatgagcaagatgtaggaagccgccctcacattcgccgttgcaagatggcgctgacatcctgtgttctaagtggtaaacaaataatctgcgcatgtgccaagggtagttttccactacatgtgctctgccttccccgtgacgacaactcggccgatgggctgcagccaatcagggagtaatacgtcctaggcggagaataattctccttaaaaagggacggggtttcgccattctctctcttgctctggctcttgcactctagcgctcttgcgctctggctcctaaagatgtaagcaatagagctcttgctctcttgctctctggctcctgaagatgtaagcaataaagttttgccgcagaagattccggtttgttgcgtctttcctggccggtcgcgagaacgcgtgtaagagcaagatacactctggaaaggcaaaaggccacatagaccatgataggcactctctccagcccagagagggtgaagaacaagggccatccagaggttccctaaaggactgagacatggaacttggccacagtacataaggatgaggaaatggaaggcccaggatctgtgaggcagctgtgggcacagcttcccaggctgagggaacatgagcctccctgtgatctgaaaccctgggagtacagatgtgcagaaggacgagagcagatgttagatggagttgttggatggagtagggaggtgtgagggatgttgtcatgtcactctgagggtggtctggacctggtggccagaggggttaggaccaagagaagaatgagaccccctctttgggcagaggcaggtctaatgactaactggctgcttgggatcagaagaccctaagggcccagggtgcctcctggtggtcctgctacctgtgtgtgtgggttgtcgactggaggggcatagagtgcctcccacagctgctggctagggtaaaggtggtcctacccagccagcctagctcccaccctggcagctccaggggaaaccctgcttttttttccccttcttttcctctttttgcctgtagctgcatttaactataaaaagcaataaattacaaatctggaaaaacatcccttgtcccacaaaggacagggctgtccccaaatgacaaatgactccgcattaacattattttgtatttataacttccgcaggacagaacttacagatgtcacgggcaagtcctgcctgcctttgggggtatttttggaacccattgtccggctgacggtgcttctaattgcggctccactctgcagggcagtgtgagcagctctggaggatgtataggtcccagtcccctcagcaggacagagtgaccaaggaagggccacttctgtctacttgcacacagaccatggaacacaccagggcaggagtttatcaaacctctactttatggtcagtcttgaagcagcattgagggagatgtcaggagcctccttttcggtgggtgggaggcttatgttagggcctgaggagggccagtgagcggctgagaggggctaagtcttaacagtagaagccaacaagggaaccacataccccgtgaggcacgttctaggatctgagagcaacacacaggctgcaggggccacactgccccaggagagctcccctcttcatttacttgctgttagcagcaatggtggggccatgactaagctgctgagacctaaggtagtgcaaaaaggcaagaagaggaggcagtgggcagcagctgtggctttggtctggcctctgtctgggaacgaagcatggctcctgttcaaggatatgaagatggcagtggagcggttagggcattgccaggcctcccgtgtgctaccgctgctcttatggtaagcccacgtctgtcaccaacacctctgcagacagggattcctaggcacagagctgctgagaactgccaacgatccctggtagcccctgaaccccaccccaaggcagccctcagttttagtgtcctaaatctgctgtactctgctaagtctaagcagtctgcgtatgcctggcaaggctgctgtgtccccttctgtcctggctccagttgtttcttgcagcacgtgcctgctgcagttctctgggttctccctagctgttaccaccaggcaggacttttgagagtctctggacttgttgggaaaagatggaggatttattttagtatttagcttcctggctcaattgtgaaatgaacaaggtgaactgccaacccatcaggatgtggctgtgggctcacccaggctctctatagagtcctgatagcagcagtgtgctgttctgaccttggccccgggcattgccttctctctagggtggtataaggtgtatgtctgctaggctggagatcttaccttctaggccaagatcttttaaatcttaggcagaagtcctggtgaggctctggaggagggtgagagtcaggctccccacggagccacgtggaagtgcagccacccatctgtggtcggatcattcctagcacatgttgctggcttaaggaggttgcagtatgaagggttttctgtgcttaaaagtttggccctggggtgcagaatttaggaaagtctgtgcacccgaggcttgggtgggacctgctgtctccccaccctagccaaaggtgttagtatgcaggggaggggaaacccaaagagttggctagtctccgttgactccattcagatgtgggcagttgaccctctccacgagccctaggccagcattttcttcctcctgtgctctacagccccagaagtgacaaatggaccagtgagtgccaggtccacagagctagggccagatggtgggggttcctctctgcttttcttcttgttgctttctctctatttctcttttggtctgtctgtctctctctttcccctgtttctctgactgtccctatctctaactgccccctctcaactctcttgtctgtctcatccccctactcccacatctctctttctccatctctttctttctcacccagggagaacccaggtggatttaacctccgagaagtgcctggcaggaggacttgcttttcccagttgcctcctactggactggcagaagacctcttggatcctagatcttagtccctgaatggcagagacgcactggcacaggacaggccacagcctctgcacacacttttcccagagctctctgtagactcaggcacatgatggaagcctccacatttgtgtgcactccacagtaactactctcagttttgttttttttcccccctgatgtttccctgcctgactcatttacaactccatcaagacaaatcctctttcaaggacatacttgtggtggcaggtctcaaaaggctctggggactcatagattgttacgttgaatagtttgtccagtggtctctttggagagctggattgtaaattcaaccctgagattagatgtgaccaggcaggtgagggggaggtatcttaggtcgctctctttgaggaggagatgtcacttctttgagaggatggtattgtcaccttgatggcctgcttgggacctataagcaagcagatgagtgacccccatctatccttgctggatcctctgtgaggagggactgtggggatctggctgggacaccagtggctgtgtctcatttgtcccgaagtctacctcaccactgttccaatccttttggataaggaggcagtgactctggcttctgcagccctgtgaaggtcacctttgctgttttcttccttgttatcaagttgacttgaagtttagtttggatttccagcacccacttaaagctagacacagaaacgtgtgtctataggcccagtgctgtgggtgggtccttagagcccattggctagcactgtgggagggcgggtccttagagcccattggctagtgctgtgggagggcgggttcttagaatctttggctagtgctatgagaaggtgggcccttagagcccattggcctgctggcctagcctaattgatgagtggcaggtacagcagagagagcccgtgtcaaaaaaaaaacaaaaaaacaaaaacaaaacaacatcaaaaacaacaacaaaaaaaaaacaaaacaaaaaaacaaaaaaagggctggagagatggctcagctgttaagagcattgactgctgttccagaggtcttgagttcaattcccagcaaccacatgttggctcacaaccatctgtaatgggatatgatgccctcttctggtttgtctgaagacagctacagtgtactcacatcggttacaaatctaaaaagaatatggaaagaatcattaaaaacaaacaaacaaacaaacaaacaaaacaagccaggcagtggtgggacacgcctttaatctgagcacttgggagtcagggacaggtggatttctgagttcaaggccagcctggtctacagagtgagggacagccagggctatacagggaaaccctgtcttgaataaccaaaccaaaccaaaccaaaccaaaccaaaccaaaccaaaccaaaccaaaccaaaccaaacaacgacaacaacaaaaacccaaggcagaggatctctgaatttgaggccactctggtcgacagcttgagttccaggccagctacggctataccgtgagaactcaatcatcaatcaaccagacaaacaattcttgtggctactcctaacagtgggggtggggtgtgtttctgactctttttgcctgcccttgggacccttttcctcatgttgggttgcctcatccagccttgatatgagggtttgtgcctgatctttttttcttctttaaagatttatttacttatatgagtacactgtagctgcctttatttatttatatgagacacatcagatggttgtaagccaccatgtagttggtggaaattgaactcaggacctctggaagagcaggcagtgctcttaaccactgacccatttctccagcccccttgttcctgatctcattgtaacttgctatgccatgtttggtggatatccctgggaggcctgctctttttttccaaagggaaacaaaggaagagaggatctgggggagaggggaggcaggggtagggactgggaggagcaggggaggggaactgcagtcaggatgtaatatatgaaagaataaaagaaaaacaaacaaacaaaatattacaactcaataataatattttttgttttgttttttgaatttttttgtttgttttgattttcaaacagagttctctgtgttgccatgactgtagaccggcttggcttcgaactcacaaagatctgtttgccgctgccttgagttctgggactaaaggcgtgtacccagttttggaagtctgaattttaagagctcagctacacacagtccctctagtaattatcagattccttctttttggatatctgccatgtttcctctgcccaaggacagctctgggatgacaagtgatggatgagacccaaatcagcatttcctagtgagaggtagcctcatgggatcttgtccacagcaaaaggagaacttatcacctcacattgcaatgcctaggcccacaaatacacacagatgtgtatgcatgattatgctaatttgtctacaagaggcctctggagctggctggagcacttgacctccaaggacggtgacaggactctattgatcctgcttttttcattcttcccaaaagtactggaggaggaggtggtcacttagtgcccatgttactggttagacacacaagagtcaggaagggcattagagtcaggcagggatgctggcaagtgtctcctgtacctgagagtaaatgtagctgcttgcggaggggagccctggaatagaggggggttgttcctggggcctagtcaacagtgtggacctggaatgggagtccagggttcctggggcctagtcataactgcagagttgaatcttgaagaagtagtgtttggaggcaaagaagcaggattgaacctacatcatagaaagtctgagctccaggccaaatacagggaatggaggatagacagcaacggtaattgggtgctggatgggagggcatagctagaagatttgggaacccaaggcaacagagttttgcagaagtgggcacaggctcaggtgtatatgacaggcagggagatcctttccagatggccaatggtgggggaggagaagacatggcttgtcccagagtccagggtggaggcctgtcctagggtgaggctggggcccgcctctgtcagtaccgccttcctcctcccccatgctggtcagctcagagcggccagacgctgtccaccagcggtgccgagcttgctttatcagataataaataagaccgctggagccgtccgtgtcaacatcttggcggcgtttggggcccagaggggagggggctgctcctgaagggcttagtcagccccctccccctttgaggccagggtcagcctttacccaagtgtttgtataggaaattaaggcatcacaactgccccgcccaaagcctggcagctacaagaaacagtctctttggcttctcctcatcctgtagacagggaatgaagggggcacagcaggggcttagttccttgcatcacatggtccatgcacgggataggcctggtctggttggctgtttggcattaatatagggtaatgtgagatgtgatgcactctaagctacaccagggtggaactggaggtgcggctgacacttctgagtctccctgttagctggtgtccctgccctagctgggtcccaaagagggttggagtcttccctttgctgctttttcaggtctatttttagaggcactagagagactccgagggactcccagctgtaggcccatatctgacaaaacacagggaaccgggaccacagagcatcagctctcacctgtccgcccaggccgcttactttaccttaaggaatgctgcctgagcccctagaactgtccacagggctgtgaaaaaagacagtgggagggccttgtggatgttcagtgccccttctgcaacatggcgccttcaatcttttgatgagattggcatgatgctgctgacagtagcaagtagtctgttctaagaaatgcccttacttggtcaaacaggaagctactgcactccacgtgcctcttcccctaaacttttctctctgagaccccaggctttcagatgaacaccagggagaatttgctccactttctggcaggcttacctttttagcctttgggctgtgtgcaagcttaggtctcagttcaatgctgaggcagtacagtcagtatttggcttcttggtgtaggacagctctcagggtcaggtgcctgatgctctggcatgaagcatctaggggtcaatgtcaccttgcatccacagagaacacaccaatacaagctgcagcaagatgccagaattgaggaggagtgtattgtaccagcctggaggaggagtgcctgtcttctgtgctccagtcatggggcagggccctggccagagggctctggcaagaaactccaatggacgggaccctggtctccccacctctgtgccccatgtgttctgctttgcatgggtctccttccttcttttcttgtcttttcaggacaaatcatgagggttaaaaaaatattttcggccgggcatggtggcacacgcctttaatcccagcacttgggaggcagaggcaggcggatttctgagttcgaggccagcctggtctacaaagtgagttccaaggacagccagggctatacagagaaaccctgtcttgaaaaacaaaacaaaacaaaaaatattttggccaggaagagacagacttggggtattgtggccccttctgcttcagggtctggggtgatggagatggaacatattacaggcagcagacagcggggctttcctttccatcctgctgttcagataagcctctcagttgctctggcctgagtgagtgtacagctcatctggtggtttatgaccagcgggcaggatgaggatgggagtcaggaggaagggcagtggcggggtgcttggtagctatattaaggacttggtacactggcttcctcctaaagaggaagacactcaaatttagcagcagtaaccatgcccagtgatgaacctacagccttcttcacctcagtcagctccttagttaaaaaacagcatcagggagctggaggaacgaatggctcagcagttaggagcacttgctgccttttcagatgatctgttcagttcttagcactcacaagatggtccccaaacacctgcaactcgagtgccaggggatcccaaggcaccaggcatgcatgtgacacacacacatgcagacatgcatgcatgtgacacacacacatgcagacatgcatgagatacacacacatacattcaggcatgcatgtgatacacaagcatacatgcaggcatgcatgtgatacacaagcatacatgcaggcatgcatgtgatacacacacatacatgcaggcaaaacactcatatggatgaaataaataaattaaaaactgagaaagcaaaaggaagccaggtggctcatgcctttaatcctagtactcaggaggcagaggcaggcaggtctctgtgagtttgaggccagcctggtctacataatgagttccaggacagccagagctacatagtaaggccctgtctcaaaaaacaaaacaaaacaaaataacaacaacaaaaaacaaacgaatgaaacaaagaaaggcagagaaaccaacgtggaagggatcttatgtcttcatgcccctctcttcccgagttcccttcctctccattcaagggggtgccatctgccttgtgccttacactgtggctgtctccaggaagccttcctaggttggtgagtgccttgaaccacctcaaaggtacatgaattacggatgtgctcacagacacctctctaatcacagaaggggaaactgaggctaggacactaggaacacacagagctcctaggaacagcactgtatcgagaacatggtgctatgaccttgtgcacagctgtggtcctgtctgcatctgtgcacacttggggtatgggtgcttggagatgctcacacggtgttgcctgtgtccaggtctctagtcccctcctctccttactccagcctctgggatgtgataacagacacctaggcagctggctttcttccacagatacacgggtggtgaggtatgcctgcttggagctagttacaagagcatgtcttgcctttgcccctgcgatgcctgcaaatgctgcaggctactgcctcttgatttccttctaaccagggcctactgcctctccctcaagctgaactggaaggaaggattgagggtccacgcaggagacaggttaggggtgaccttcatgggtggatgatccctgactcccttgcttcttggtttcctcactggggagtggaagcctgggatggccaggaattagcccgttgagctaaaacctgtgggaatgcggcatatagaacacctgtcttttgttgcctgtcacctccctgtaccagggccctagaactgacctgcaggccttgggcaaagtcaccaccagctgatgtgacctgggtgaagaagatgctacaaatagggctgtgttgccaactgctggaataatggctgagctaggccacaaggtcacacatcacccaattccaacagtgtctctgcaggtctgcccactagcaaacaccttagtacgcagattgccagaacaaggccctttactgcctggcctggaaacaaacatacaaataaatacagaagtctgcgatgatgggccggagggatgcgtttgccttggggcggtgtcctggtacagtgctcaacctgtacactggtctctggcagtcctgcgtctgtaagcaagagtgtgctctctcagtcgtacagagtcaaacacgggaaatgaagacgacgagggcccagaggccctatttcttattgcctgcctggagtatgtttgtttcacttggatcagattttactgtgggatactatgaacctttgccagctgctacaaactgtaaattttgacgatcgatgtcaagagctaaattcaagtaattggtggatatctccagtcatcttggctgcagagaggtccatgagggggtctagggagtccattactaccccggctgaggctccaacccttcatccaccagcctgcttctttctccaggcaatcagcacagaaaatttcgccagcatagtggtgagggacctctggggctgctgacacaggaactaacttctgttcctgggatgtactgtggtgacagtttcctgagcacctaggccaaggccagagcacaccaggtctcctgacgtaggaccccactgagaccagcctgggggctcatggacgaggaggtgaaggcaaagtcttcaggttcgaacttgaactccaaatggctggaggccagggattcgtccgctgggctggaggcctgcaggtggatggaacagagtatggaggagtctagcacctctctgggtctaggaagcacagcacagggtgatttgctctaagggcccgtgagcctagaatgagcacaaagtccactgaggagcaggactagtaagacctgcagggcccaggaccatgccacacacagttccagggaagaggccaccatattggtggttgagggccatgtgtgcagtaaagctctgggaggggtcttagggggctctgatgggatcggagttggtgaagagtcaaggttctccagagaagtgtgaggatctatctcttgcactcccctgcctcatcctccttacctgggaggtgatagtgggcccagcacacactggagatgccagactggactctgccttcaaagtggtggctgagctctcagagttgaggagagtgggagaagaggctgtggtgtttgctgtggatcctgcgaaggaagggggggtgtggaacatttacagaaggtgccatacctgaccatatttctcaccatgtggccaattctcctgtccttgtccagattcagagacttcttaaagtcacacattactgaatgctggagggtcaggtatagcttcagccaccccacatctgtccatgggcccctcccccagcaagactaaggacatccatctggggctgggttagattgagactcagagacctgggagtggcccgggaatggcccctcctgacttcctgcttacctgaggagcccttgattttggcagggttctttggcttccgttttcttgtctggatactctcctttttcattgccagtggccttggcacctggtagggacagcaagggttggtggctgctccctgtcccttctcacccccggacccttgcacagtcaccttcctgaactaccctggagagccagtcccctcctagatgctgggctgacctaaaggcacaggcctgttgagtcagctcctcccttgggtgccatgccatctgcctgacagttggcaggggtggagttcagagagggcaagatttgggagtccagcatctatcctaggctgaaaagccctggcgagctccctgaacctcagtggtcaggtctgtacagtagatatggaggtaacagtttggtctcccagaggagtgggtatgcagacagtcaacacttgtataacacttcctgaacatgttcaagccaggggccaggggccatcctgtctctctgggaagagggacaaccacatgattctagatagaggtagatactccctgccactcaccccatggagcttcatgtagaggccacaggcgttgcacactggttcgccctccgagttgcgcctccagagggtggtggtggcagtatggcagttggagcagcataggccggatcttcgggatgaggactgtggggcaagtgaactggggtgagcccagatattagggaactctgatgcagacttgggggcctctggggcagtaaacgacaactaacaggatggatggaagctagactcagcagttatcaggccattctggttgagtgagatgcttgggtgctgaaggcttaaggtctgccatggacgtatctggcaggacacaatgtcctttgctctacaaagttttgactttttggccttctggtcctaggaccaatcccttcacctctgggcatttcccatccctgagatgtaacagacaatcagagtctagttgtggagttctgagcccaggaaggcctagtgtagaaatacagctatggattattgatcaatagccagattgatctaaccggcacctctgtctgggatcagtgtcctgaaggccacagagtcctgaggaagtcaggcctggtcaggcacaaaggttaactctcagggtcctgctaatcaacttgcaaacctgtctcccaagagctcagagtacacattgacaacaccccacacatcccacaatatccccagtacccagagtattgagtagagggtgcagggtcctatctgttatgtgtatatacccttgctgtgcttagtgcctggagtcccctgatttcacacacttgaaccccaccagagacctcagacttccctgtgtttggggagcttgggccctgagctagagaggaagctgagcacagaaatctgggcctaactaatgaagttggtgagggagcaaggaatgggcttcctgtgctgcatttggggaatcatcccagaaggccaaactgtcttcaccaagctcaatgtctcctgagctgcctgagatctgaacctttcctgcactgctcacagttcagtgtgtgatgggatcttgtctctgttatcaaaagctccatctaaacacctggaccctaagtccttcctgaacttcacagcccagccttgctgtgacactactgtcatcagactgtaccattctgtccccactttggacagtaccttttggatagtacatctgatcccatccccatctgttctctttatggttcaggactgaaaattcaactacagttctagaacagcagctataagagtgttctcagcagtacctagaatatgactagtaagatatccatctttatctggaagtcacacttaactaggtgactggcactttgcagttgtcagttcctgctggacctttagactctggggagccctggcctctggcctctctttttccatgaaccagctaggaactatgggaaccttctgagacatggcaggtaagaagtaaaagtatgtgtcttatgtgcagaccatacacaggagaaaggtgcacggtatctccacatgatcagaagtgcaagagaaaagtctggaaaccatgttggaatctttcatggtgaatatcttttactttcataaaattaaaaccataggaaaacataactacctgagaagtgcttgcctttccctcaaacttcacaactgtcagtcattgcccagaaggaaaacggaagttcagacatgtcaaggcaccacagaaaattgaggagccaggtcgactgaaccttctctttctgttgagcacttgggcacattcccatttgccacaccccaatgccacctcaacacccccctccaccctctatctgtccttctttgtctatgccagcaacaggcaggctctcctggatgcacttctctctctctctctctctctctctctctcctgttcttttcaagagaagttcatctttaatggctgttcacctgaaggagagcaaaattaagtgccaggctccatgcatcggagaggacaaaggcagccctgctaaggcatacacacagggactgtggctggaaccctgtttgggggtcaagccatgtatgcaggggagctgtttgaaaatgcaaactgcaacacaaagtgttgcagagtggcttccttgcccagaacgcagttacccaagattggctgagagagccaactggagctttggggataggccaaggctcgaaagggtccaagtgtaccctcttctgtagaagacacagcagattaagtctaactttgtcccttgtctgctgacagaaaactgagatgggagtatgagtggtgacaggagtggtttggggccaggggcccacatccctctaccccagaccagacagggactcttgcctgattcttccttgtttatctctgtgtctgagtgtccagtgcagatcctggcacagaggagagtgggcagagtcaagcaagagacagggcaggtctgctgcctggggagactgcactcaggcttgggtgcagtcctccatgactgggctgtgtctctatggtttcctcattagtgaatgtcacagggaccagggtgggcagctcatggagggcacagtagcctctgaggtggcccctcagatggcaagaagcaaagtattggacagaatgggcctgcagataccaaaccccagctcaaggaaagcatgacttccctaagtcccaccccccccatttttttttcgagacagggtttctctgtgtagtcctggatgtcctggaactcactctgtagaccaggctggcttcaaactcagaaatttgcctgcctctgcctcccaagtgctgggattaaagaaaggcgtgtgccaccacacctggccattagtccccttcttgtatcctacctgtatcctggagctcacaagtttattcccatctcagggcctctcatgcccacaacactgagatgtacagccccaagttcatgcactcagaaccaccttcaacacaggcgacaggctgggcccagtcctcaggcactgcctgttatggacatggggccttctgaaacttggagggtaagaagcctgctcccaggcagagatgttggcactcataaggggttcacatttttagataggaaggcctggtactcaggactagtcctgttcaggtctgagacccacgaacccaccatagtcttcatagcaagagcataagctgccaactccaacttaaacacatatttataacttggcctgtgagatgacagcaaagatacttcctgcctcagaaacttctggcgacccaagcctgaaccctgacatccccaacacctgtgctgccatgtactggaaagaaccaaaagtgaaaataagatttaaccatccagctaagcaaagggcagaagcctggtttcctagagacccttgaagcataggcagaaaatgtttcccaagaacacacatccaaagaccctgtcatttaggctcacacacgagcatcagtgcaccccagccttatctgtgctgaatcaccttgagacctctaatactcaggactaggttgccacttactattaccaccaacacagtcctactgcaagactgctccctcagggtcccacagagactgtatccaggggttgtatttgtgtatatgtatccagggcagactcattctcaaaacggattctgagacattctgtgaatgagtagcaagtggctttgcaacatatcttgtttgtcaagtaccaagtaaccggcaatgggctgtaaggttacaatgttgcagtgggttgtgagacctgagccagggccctatcaggactccttgcctggatcctgacagtcccatgaatattttcaaactccaagaggagatgagttggcctggcccaatccgagccctgggtagcctccagtgcctgtgctcccatctttaatccatccttcaggaacccagacactgctgagtttgtaggagccagcttgtccttttatcccctttgtggccctggccctctccctgccacactcaccagacgcttctggggcctcactagcggtcggttgaccccgttcatcttgtgatagaggccgcaggcattgcatagatagtgtccggtgccgtccctgcgccacagtggtgtagacagggctccacagttgacgcactcccggccctcaccagggaactcctccaagaagtcaggtactgtggggacaagaagcttgtggactggggcctctgccccaccaggatgcctgagggtgtctgctatgcttggcctccttttatagtgtcttaaacttactcatttaaagagcgatttatttatttatatacttagtcatatttaattttcagtgaaatttgttaggtagggctgcttttataaggcaagagtgtaaataagccacactctaaggtagatgcctgagatggtccctttcttaactaggttccacaccagcctttttatttttaatacattttggaagcaggcagaaggaaatggatggtagagccttatttctctccctcccctgtcccactcaaggatctccagtgtaaaagagaacaggcctcaaggtcagaagattgggagacagagatttgagattctacaagggcctactgccagctttgttgtgggatcaaccattgtcctccctcagaagacaagacacagggacatcaagggaccacacatatgcaagcagtgagacgttggctcagggcagggaggatcagtcatctactggctggaggtgggtaaaaggcacaggggctgtccttgtcccactaactgtactaggtcagcttgagacctgtctggggctgtgaatcaggggcccaagcttccaagtagctggaggcatggtttcaacaaggcccagaggctgcaaacagagcttggccctctttgctgtgtctgttcctcaaaaaatactcagaaagccagacaaatgattccacgatcaacagtcttggaatccaatctaacctatgttcctgtgaggtatggaactcttaagatggaacgttgcagaacaagatggctgtggtgactttatcaaataatcgctgttttaagctttataaaattcattttcagctccgctcatgcctgtaaactcagcactttggaaggctgaagcaggaggtttgctgttaagtttggaactaggttgtcttaaaaccaaaaaatactttccaaaacttcccgtgaaaactttttaaatgtaggttccaaatcgacataacccagaatgctttttttttggggggggggggttggtcgggtgaaaagcagaaatatattattttcttgctattgtgctgagaaaagaattctgtatcgagcgtttttcatcgtattgtgtttcatgaagtttcctgtgtcctagcaattctaggcgggaatctgcgtggtcggactaggcagaaaagccctgactgcagaagaacgcatctcggatttttgcatttcgtagcgcgcgggtttattgctgcgcgccttagttttagagccaggtccaccgggcagccccagcccggtactcaccgaagctggtcctgcggccagggaggccaccagggcgagcttgcagaccgtgcaggatgctgctgtcgaaggctccggaggtccacgaaggggctacgtcggaactcatgtatgctgggtaggttgtggggtacgaggcgcccatgggtctcccgagcggggtcgggtactgttcgcgagccagcagcgcgccctggaaggcgccgccgtcccggacccccgcgctgccgccgctgcccgaccccggagggctgtgagcgaacgggaaggtggtggctcccggtgggtgtgcggctggcgggtgcgggcttccggagccgaaggctgaggaatcagcggcaactgcttgtgtccagctggagtgcgcggcgagcgcgggagcctgcgagcccggctcacacgaaggcaggtacggcagcatggagggcatgcgagtgggtgccacgaacaccggggagccggttcccgaagagtgcagaaaggctccggagtcggcgtaagtgccctggccggggctctgggctaacgccaagctttggtacattttttttccccgcgcgagcttgacctgcagagaagaaagacgggcagacgtctagggcaggatcactgggccccctccatcagctcttgcgctcgcccggggcaggtgctgctgctccgcttgggcactccacttttttgagtcggttcaccagggcaggtcccgggctcctctgggtggaatgacagggttagatgaggcgcaggaccctaggaacgaggtccttgccttgcgcagagatcgccagccaaagccctcacaggaaggcgcggcgttggcccagggagggtgaccggtgggttgtagactgggtctccacagagccgctctgtagggaatcccgggaacttgggctgccccgcccccgccgtgccgccccttctctcttctagtcggtccctccctccgctcagggtcagcgccggggctccagccgcggggccacgtgacccgaacaggctctgctgtccggctttgagaccacagctcgcccgcgtaccctcggctgagcccgaacaaacagggggtgggaggaggctgagcgcgagcactcctgggacagcagcagctctgaaccgtctagaactttgttgctacggtcacgggtgccagtcctcgccccacgtctattccgagctcccgcccaaagctggtttagtgtcctgtggctgaggcccttctgaatctagggacacaaggtgctggagccaagttggcttgcgattgattccccctatacgcccgaacctacgtgggaatctagcttcaatggcaaccgcagggctcaggctgctattctctcactgggtattttgttcatcagcaatgactcgaagtccaccaggaaccccacagtactgagtttttgaacaaggaggaccactcgctgtttgaccagcgccagcgaactctgagtagagtcctaaggccacaattgaagactgttagactccaagtcccgcggctttcacaggctgaggaacttggcaagagtctctttcagcaagagactgatgatagagcacctagctcagttttgttgtgacttatgtcctccggcttaccttactaggagttccagatgaagagtggccagaaggtgcagcaaccccggagggctcgaagatggcagcgaatgtttctcactttctcatgctggcccccccgggtgctgcagacagatacgtgggtgaggcaggagctcctgagataagggaaatacacctactaaccttgaagtcagtgtccagtgtttctgccgctcagcgcgggattagtttattagtcagaaaggagtgaacattgcctgcacactggtgtccacgcaacctgctctcttcagcgtgtggagatctagttgtgagtcacaagtggaagtgaggggggcaccctgggcctggggatggtacagactgtcctgacacaggccccagaatctgagccatggaggtgcagagcagaagctgacttcgggtagtcgtgggaaggggagcttgccagtgcttcctgcttcaaattacctcccactgcattctcctggcctccccttttcctccctccttgaggtgggggctgagtcagggctcttggttgatgcttccagcactgacttcatggttctcctttctgtgggatgcgcaatacttgggtctccagtcttggcatcccttttcctcggaactctttaggcttccattgtgcaggtcttcctctttgcaaagcgtcttggagcaggaaggacgtccaggtgcccatcttgggagactgctgggtgcagttggcattgaccagtgggcagcacggcactccagcttcctcctgattatgtttaaatgaaatgggaagatttccccatgtactccaccaagtccaggatgaaaagtgaggggaatcacttgctggggacggaatcctcttctccccagataatcagtagtagatctagggtcctgcaaggatggacctagatggacttgggctttttgggtgggataaactcagtaaagtccacaaggtggaaagaaccacaggacacaggtgctgggttttgttctgtgacacattttattgttgcctcagtcttaataaggcagatgaagttattcctgtttacacacagaggaacaacactaacttatccaaagtcacacaactgataactcaacatgctgattcagacaaatgaagaattgagaagggactcctggtctctatagatatgggaaaggggaggaaatccacccttctcaggctcctcggtcccacagaggcagtcctgtcagtgcccaggtctagacagggaagtaggctcatctcttcagagagtaggggcagaagtggctgcagggtgtcctttgcccagatcaggttgcctcacagtggtgggacactggctgtgacaatatctgaccctttaactggatccttctgcttgaggagaagaaggcgaagtctcagatcaaaccacaaaccctaggtccttctagctccatcttgtccctcccccagaggtcagctctgatgccatgatcccgcctaccagttccaggagggaaccaccagccctgtagttgtttctctatccacaggactttcttgttgctattccccaaccaaaagagagtttcctctcttcactgttcaccaaactcctacacacacccccagggtccacataacttcccatggctcatttcaagcattccactgacagattgttaggtgtttctgtcaggcccctcagcagactcagagtcccaaagtcagctttgaggaaagcaggatggagcacggacaggaagcagccagactctgcaggggactcagctttgctgtggcaaggctttacagcattcattggctagccgttttttctttgtgtaataatagcacttacctctcacagtggcttcagggagggattggtgggactaagcatctgtgcagctgccgtaaggtgtgcatgtggcaggccctcaacaggctccgggcagaggctgattgattctggtcaggtgggagaatgagcaagccctggccccagagtgaagggcagttaggcaggtgggagcctcagccagtctttcgggctcccctggcctagcaggcagacctgactgagccaggtaaggagaaaggacagctctttgagataaggatcccatattctccgagagggatggggggttggcgtgttcgtgaccctgtgaccaatctgaactgagtttaatccatgatctccggattaagagagcctgagtggccaagttggaggacggggagaggaacctcctgccagcctgacaggatctgggtttcatttgcagctgtcacttgcccaacagccccccccccccacctcgagcttgggaactgttaatgcagacacatttatcgaaggaaaagaaaacaatcctattgttaagggataagggggcgtcagggcctctagactgactccctagagggcccttagacgtctggggtatgtatcgcatttgggccgtgtttgctcttagggacatttgccctctgcagtgggaataacctgggacaggagaccttttaatgattgcctccaggtggaggagccctgtgtgcacacaccttgcctgtactcactggcatgatgcttgtggccactaggctttgagtgcaaacagaggtggccttagtctaacctgagggtaacccctgaaagcagggctgcctaggtgcagagttgggactggactggctcctccaggtccacccacgggcaccccattgctctgtgagagatcagattgctgtgaaaaagtctgggggcttcctttgcttcctatggtagcctgggggtccagggaggcctccagcatgcagggctataccttcagtgagtactgctgcccacttcttagggtgcagaaagctagcttaccacccccactatttttttcagctcctttccccaaatgtgaggacaagcagacattcagtgaaatcccccaatagataaatattctgtgcacataggaaggacaccttaaagctgagtggcagtataggtgaggggacaacaggttccatcaccaggcacactgtatctggcagtaggaggggcttggtgtgatgcttttagtggatgggctaggaacaaggtttgactcacctgagagattctgatgcttgggaatccagctgacctcaccttagccctcaaggtgaccctgtgtgaaagggcaactctgctatcttgtctgtagagctttttggaggtccataggagaagctgaggattctcatggctgaatctcctggtcagcattagggtgacctaggaagggactgacgctttccgagagcctatcctacccaggtacccgtgaaaggggagctgtgtacagtgccacttaaaacacccatttcctaccaggtgccaggtcggtgaagacgtttcttccataatatgccatctggatagtcttagagcttggcggctaagagggccggggggagatggagagctgttggttgttgcattctgagactcttccccgggagctgtctgcagctctgggtgaacggcatgatgtagaacatggcaagccagtgacccagaggctttgaggtctggggcagttgcagcaatctaaaaattggccagaatttaagtgaggcacagcaatgctaatttatttgtatacttggggggggggctttccagcctaggatactccccagtcagctcaggaccagccgggtcttgaagtagcataggtttagcgaggacttaactgctgggcatacagagtctctttcactaatgtgtgggcacggtctccactacctaggtgaactgtggtgtgtcagcagcaccttgagcccacatgtcaactggactaccccagtgagcatcctctgtcccccacagttatcaaggaccccctgtctccccacagtgagagacaggttttgccaggtgctcagagactatcccagggatgcaaagagggctggtgagtacccttggcgataacttataatgtaaatggatttgactctcccacttttatgttcaagtgtctgggggtgatcagctggcctgtgctggcctgtactggcctatgcagggctgggttgggcattgccaggctgtggcaaggcagactatgtgagttgagtcaggttgttcctggtggaaaggactcaagccgcctcctctacttcttgaccttactaaatcttctgggcaggtttacttggctagacctggagctggtccggctagggggaggggagaaggggtacagatctgagtgcagccaggcaatgggcaagcgctcagagtggtgctagccacatagtacacagggtacttcagccttctcttatctgtaaatatttctttccgtcccctccctcctcccttcccccctctctcttttctctgcttttagcctcatctgtgaaggagccgaggaagctacagccttctgatcgcctcccactttattccccaagaattctacacagagggactcgggctcctgactgaagttgtactgggcgttgaacttctgcgtgctttaaggaggctccacgatgtctgttgggagcctcgttgcttttttccaggtctgtggaggaggacagcccaccaactcctgtccctcaagaccacagtccccagggccaggagcaggggtttatcgtattttggttgtgtctgcttagtgtactgactccggaagtgtcagaagccatcaaccaactcctgttggtggagatttgggatgtgaacccgaggaagttaaaaggtttccgaagcgccgagtagtctagatagaagaagggtggttgattggctgagggacagatgcctgccttttattctcattttaactctgtgtgtgtgtgtgtgtgtgagagagagagagagagagagagagaggagactgagaatgtgtgtgtgtatgtgtgactgagaatgtgtgtgtaagtgtgtgagtgtttgtgagagtgtgtgtgactgagaatgtgttgtgagagagtgtgtgtgtgtgtatgagagagagagtgtgtgagagagtgtatgtctgagtgtgtagatatgagtgtgttaaatgaatatgagtgtgtgtgttgagaatgtgtgtgtgtgtctacagacgtgcattcatgtgagtctggacatatgtgtgtgtgggcatgtgaatgtacatgtacaagcagcacacataggtgattgtgtatccttgtgagagaacacatgtgtgtgtacatatgtgactggattatatgtgcatatatatattatatgtatatgtgtctatgtatatacatattatttcttttaaaataaacagtgtgtggatacctgggtaagaaagatgaggggagggagtgttcttatatggtttgcctgtagacattgtaaaagtcacacaaagcacataatgaaagagagagagagagagagaatgtgcttgagccagggtttgccaggcagactggcctgccagcctgaacagagagggagcatattgtctttgacactcagtgagaagtgccctaagccctcttgtggcttcactttctgtctgagctccatcatgtagaggtttgggagggaggatacagagctgagccgccaagctctttgctgaactctcaggcaagagcactgggccattcatgtcctcagagcagccccagttcgtgcatccagcctacccaggactcactaagtagtcgcctggttgtgattccacctccagggctgacagactggtagtcatttctccctgactgttctccatgatgtctgccttgcccagccaccattagagtctgtcccaggctgtgcctgcctctgaaccctgtctggaagttgcctttctcctgaggaggaatttctcaccagcagctacagctgcaactggaaatctacaaaacagttttctgcagatgaatcttactagaaaacctggtcctcccacctcccgtaggcctggagcccctgcctggtgcagcttcctttggaggagagataagcgagcttttggcatcttgctagctgaagaacgggcccatcccactgacatggtggcgccagcgctgacaccagctgtcagttggggctcaagcagaaagagcccccccccccgggtggcctggcttctctagctggtggctctgggtgctgagaggaatgcccggcacccagcgtgttcactggggaccactgtctctgctatggcccagggtgagcaagcttttctttcctagagtctttctacgcttgtgtgtgtgtgtgtgtgtgtgtgtgtgtgtgtgtggcaacacccagtgagcacacagaagtatcgagcacctcctgaacctcatgggaggtgaaggtgtgtggtggcacagggaggtaaacgcaggtgtcatggtggggagggctgtggggagagggacagggagttttgcctttttagactgtaggggtctttgtgaggcagagaagcccacccattcctgtaccttgcttggggaatgcctccgtgctgttgcttaggctagtttgcaaacaggcagtcatgataggtgctccactttgctttaaaaactggaaaggtttatgagaaaataaaaatatcaaaaccaaggactgtgagatccctagcacttgggaggtggcagaggaaggaccggaagtttgagatcatcctgggcttcttggaaaagtcaatgctagtttcagccgtgtgaaacagaacaagacaaagcaaacaaataaacaaacaaccccccccccccaagctggtagccatgactgtagcaacctgagaggccactctttgccctgcaaagccccaccattccttgctgcctgctttttcccatgggactcctttgatgcaacctctgctcagacatctcactgagaaggcaaatctctcctgatgagacttccccttttcaaagcgtcctgtctcggtctctgcagcttggaccacttgctgcaggacttgagcaggactgcaagtctctctgggccatgccacacagactgtgtccccagagctggaaatggaaaatgtgattcaccttgccctggagctgcttctgctcagggcagggctgtctggtgccctgggtggaagttgtgctggatctgtcaatttgtctcctctgaagtctggttcctgctgaaggcctctattcctttgtcctctcagggactgaaaaatgacaggcgctggtggtagggttcattccatccattcaggaagagaagcttgttctgtgtaaatgagcctggcaggggattcacagaggatctgctgggaggagacacttggttgtagggagtggaagggtgagtctttcctctgttggctttgcctgtagcctgataactgcttctgctttggtgaaaccctatagaactgttcccactgataatcctctggtctcagttagacatccaggcccagccccgtgggatccagatggaaggagtccaaggtagaattaacccctccttttctgtagccatgtttctatacacttgcatggaaacattgatagatttcccacaaatgggctttctgtggatggcagcagcttgtgctgtctagtaaaggctatcgggtcccttccaaaatgctggaggacgcagggttggcaaggaagcagggctagctgtgtttttcaccatttgcatgggtaaagcctttttacatcagctaccccactgcccatagactgagagcccctttgcccattctgtggatctcatctgggtctttttagatcccgtacttggtttctactcatcgttgcctgtaggcttctgcctcttctgccagaaccgacacctcccaggaaaatgccctggcacagcaaacaggcagccgtggactttgagcctgggccacggcagtgagaaggcgtttcccggcacagacggctctgacctttgcggcaccccaaatgcagatggaatggagggcttgtcttggcaattgggcgcgggtgggttggagcaggagggcgagggtcctccctgagaggtggcgcatggtacagcctggaacaggtggtgactcactgatcacccagccataaagtcagggtgatggcccagcatcccagctggttccctagagctcctaagatccctacccttccctgcagctgagccaggtaggtcttccacaaaggacggcctgggctggctctgagccaccacttggacctcctaccccttatcactcatttgctacttcaggggaagctgagtcccagggtaggagagtaagcagcggaggctgtcccttgcacatgggactctcatttcataggaagtacagcctggatgaagattcctgctgaggcatacatagcctgctaggcacagttcccaggaggcagtggccagtcatgctctgggaaactgctcccagatctgagcgagctgattttgtagcctggcttcagagatacttcttttctgctgacgttagggcagatcttgcctcagtgtcctcatggcagcccttccagacctggctgagtaaaggattttggtgggatgggattgtgatctacagggtgccttatattctgccataaaaggataagtcttggggcagggcaggtccttccaggccagaaagcaactttagggagctacatgcagcagcgacagcaccgtgccatccgtcatagtatcctcgagatcccaggctgcactgggcttcagtggaggttgcagttcataggttaccgtggacccccattcgcagagccggctgagcctccaggtgcaactcgttcaggttgcacagactaacgtccctgctcctcatagttgtgtctgttgctgacacttgccctgtggcccctcctcttgtccctcccagtcccatgcctgccttgtagcccttcctttgccaagggaaccccgtgtgcctggttctctccccttgtccttgctccttcctaggaaaactgagtcctggggttgtgttgcatcctaacttagggaactttgctcactgtgggccaaagcaggcagaggaaaatctgtgctcccagaagagcaagagtcaggccagcgcccttgaggtgcccctagggagggtgtgctctggtgatcattgtcaccctcttgctaattaagtaaatagggggcatcatgtgagggagcctcgatgcagcagttctcaacctttggcggctcaaatgaccctttcacaggggtggtgtcagactaccagaaaacacacatatttagattacagttcataacagtagcaaaatgtcagctatgaagtagcaatggaaataagtttatgcttgggggtcacaacaacacgaggaactgtactaaaaggtctctgcctcaggaaggttgaggaccactgctctagggaattctcagtctctggggcctcatagaaacttaatctcctgcctgaagccgtgctacctgccagtcattcccactggggtggctgaagcaggagggtcacaggttccagaccagcctggcctacatggggaaagcttgtttctaagacagtttaatcttcctacttgccctgacacccagccttgagccccacctgcgtgttaccttgtctccagactagcttaggcacttcctggtgggtcctgagaaggctagataggccctgtgtggtgtctttcccctacttacattttgcagcctcggccatggttgagctaatattatctgttttctcaatgccctaaacagtcacacctttgaaattctgttgccacctaaggtggggagactacattaggtgacttgttaacaaattccgggatatctggagaacaattactctgcctataaggagaggttgctattgcccccattttacagataaggaacttagaggcctcagactggctatgcagcttgttcagcacccccagaatcagataaaagaacttgcatgcataacaaaactaaagaatctcaaccccatcagacaacacacacatcacaggtcacccagtttgctggggaccctcagaatggaaaccaaggcccccgcaaaggcagatgacctatctgaggttatgttgagtgggaccctaaacctcctgctgactcctccatgtctgagtgggcactctgacatctcaggatgtcaggatgtctgtctgtgcagccttgctttagttccaagattctgaggaccaggctgcagatgtttaagagtgagtatggacagcatgtgtgcatgtgtgtgtgtgtatgtatgtgtgtgcatgtgtgtgtatatgtgtgcatgtgtgcgtgtgcatgtgtgtgtatgtatatgtgtgcatgtgtgtgtgtatgtaaatgtgtgtatgtgtgtgtgtgtgtgagtgtgcgtgcgtatgtatgtatatgtgtgcatgtgtgtgtgtgtgtatgctgtaaagttggggagctaagatgccctgggctggcatcccatcttgtaggcccggagactgcttactgagcttatcagctgatggagcaatgctgtggtgagagggtgggtgagtgtgggcatgttaatatcagcttcagaggaagggaagccgaggccttggatctctagagtgagggctctttctaggaaccctggccctggcctatgtgcacagacagagtaccaggggcttgggctcacttcctttctctaaaagaggttccgggaaatgttggctggcatggaaaaccagcagactaaatatagcggtggaacttcctggaacacattattatgaatgtctgataattaatgtcaaacagtagcaccttccagaaatctgaatccaccctgcatatccaattgattggtaggagttatttcaacgcccccccaagcattacctgagaggtacctggagttcttagggcctttggggtccctggcagatatcaagggtcaggcatgccggtgagtagttctcagcccagagtgtcaggatgggctacgttggcacccacctgtcagaactgccctctttgggaagtaggttgggtccccaggaaactgtagcctctggagtgggtgaggagatctgtgtcaggcgtggctttctccagaagccctgcctgcctgctctggcccctagcaccttcactttagcccagccactgtctggtgagggtcccttctcatcctcctgagcagatgggaataggttaaggcctgaggggccctttggccctctgtcaaggagacaaacagaggatgttggctgaacacctggcagagaacgcgcacacgcaggaagaagacttttgagggagcggtgccgatttgaggactctggtagctgaagcccagaggattccttgcatgcttgctggcttcccttgtgcccagtccaggctagaatccggactgtgctttctttatgaaaaccatcctggccatcagccaccgagcctccccacaggtcttgcacagaaggccgagggtactgtgcagaggaagacccagttctggttctgcatggggctcagctgtcctggccctttaggtctgaattgttctacagacttcctgttctcaccccttctctctgcagtgagaggagatggtgggccctactccatggtcagcctgggtaactctacacaaagggacagctctggccatgcttgcacctagtaggtctccaggactctgataagctttggaggcttcctcttggagcgtgttcctgatggacaccccgaagtgaggtgaatcagcacacacctgggctggttgggtgggaacagtgcagaatggagcttggggtgttctcatctcaacccccaggcagagtcctgctacctggtagctcagctagatagcaagcagcactctgggtccctgttttcgctgagaggcctttcctgtggccctgcttttgtttggtagtgtctagtgtgcgacgggcgccccctggtggccatactgaacatttccttgagaggtggggcctgcagggtttggggagtcaggtttgttgccaggaggtccctgcagctggctagccacgaggctttaggtcctaggatcagtgggcttccagccccatggaaaatgcgagagcaagtttcactagggccacacagtatcattgagcactgagcgtggaaggagacagatgggccacgtttctcctccctctttctagccttccttctccctcccttttcttatacattatatcctggcggcagttttccctccctccactcctcccagttccttccccacttccattctcccccagatccattcctcttatgccccccccccccaagagcaggctttccatgaatacccaccaaacatggcataacaagttacaataagatcaggaacaaaccctcatatcaaggctggatgaggcaacccaacaggaggaaaagggccccaagagcaggcaaaaaactcccactgttgtgtcttctgctagaacacaaagctacacaactataatgtatatgcagaggacccagctcagtctcatcagggtccgtgtttgttgctacagtttctgtgaacctctgtgggctctgcttagttggttctgtgggttgtgttcttgtggcatcctcaactcctctggctcctacaatctttcctcccatcttctttggagttcccctggccatgcctgatgtttggttggcttggctgtgtgggcctctgcatttatttccgtcagttgctggaaagcatccctctgttgacagttggtccatgcactgatctatgaggatagcagagtatcactaggaattactttattgtcttttttgccagtcgtttttggttctctcccgagtctctgggctgtccagtctctggttcctggccttccagacactgtcagttgtgggttcccttttgtggtgttggcctcaacttggccagtcattggttggccattcccacaagttctacaccaccattaccctagcatgtctcgcaggcaggacagattgtacgcggaaggatttatggctgggttatgtctcagtcccagggctggaagccttgcctggttaaagaagacagctagttctgactcagtattccctgttactagcagaattcactaggattaccctcaccctcagggcatttccacagcactagggttctgcattgcctctccaataccccctccaattccagtcgcctttcccagaactctcctcccccagcctgatccctattgttcccacccccatccacccccagtccacctacaaagctctttccccttcccaagaagatccatgagtttctctgtgtctgtggattggagtatgatctgtggatttagcagctaatgttcacttaccagtgagtacacaccgtttgtcttttgggtctgggttacctcactcagggtggattttggatttttttttttgagtgctatccatttgtctgcaaatgtcatgatgtc

SEQ ID NO: 3 - DNA, 215247 bp, Mus musculus
aaagctaggcggaaacccaagtgcttaaatggctacagtactctcacccaaggcaaaaaagaaaagtatcaaagccaggctccagatatgcctggccctgcggtccaggcactcggcaggagaaggctgaggcagagtagacctcaaggtcagccacataacaattgtctcaaaaaaaaaaaaaatacagaaagagagagagagagagagagagagagagagagagagaggaaggaaggaaggaaggaaggaaggaaggaaggaaggaaggaaggaagggaaaaagaagaagaagaaagaaaaagaaagagagaaagagaaaaaggaaagaaatacctttatacagcgataacaccggtttggtgtccatccagtccagccctcactatccaaccctccctgaacctggagctaaactggaggccagcaagccccagcaatcctcctgtctccacgccccaaagcactccagctactggaggcacacaaggccctgccctgcttctcaggtgggtggggaacccaaacctcatgctgaagtagcagtggctcttcacagacacagtctctcttagcacaggctatcctcaaactcattgcagacctaaggctagccttagattctttcctgatcttccagcttccaccacccaagtgctcgatgggtaagtgttcttttctttcccaaaatgcagaagacaagaaaagaccagtgagccagagaatacagagagcccaaaaagaaaacaacacagtcatgatcacccaggccatgagaacagacaggcatgaaaaacagagtgctctattgacagtaagaacaacaacactaacagggctgaaggcggctcagttggtagggtgctagttccatccccagcactggctgtggtgatataaactcacaatcccactgctctctggagagacatgggaagattagaagttgaaagtcaccctcacctacatactaagttaaggccagcctgggctacattacacacacacacacacacacacacacacaaacacacatacatgcacatacacacacacatacacatatacacacacaaacacacatacagacatacacacatacagacagacacacatacatacacatacacacacacacatacacacacacatacacacacatacacacactttttaaaaaagatttatttatttattttatgtatttttatgtatattgtcactgtcttcagacacacaccagaagagggcattagctcgcattacagatggttgtgagccaccatgttgctgggaactgaactcatgacctacagaagagcagccaatgctctgaactgctgagtcatctctccagctcccctcccccccacattcttaatatacactctatagatgaatgacagacaacttctaaaactatagtgaagggttaaagggctataaaattccactgaagatatctagaaagattgtagctaagtaggtgtgggctggtgagatggctcagtgggtaagggtgatcttagcaaaaccaaaagttgtcctctgaaatacacacacacacacacacacacacaccaaaaaaataaataagtaaaaataaaagaaagagtaaagctggagctgctggtataggcctttgatcccagtgctcaggaggcagaaccagcggatcggatctctgtgagtccgaggttagcctagtcaggagttccagctatgtatcaaggccctgtctcaggggaaaaactcaggggaaaaaaaagagaaaggaaaaaaaaatgatacagaagatgtgtttattggagcaaaggcctcaagatatctcactactcgtacaaagaaagaatggtagacaggaaatgatcaaatatgaataaaaatagaaactcaaaaacaatttcaggctggaaggattgaatcctgagattgacaggcacccagcacagcaaacacaaaaggaggccacagcagacactcctgcacagaatctcaagacagctaggatggcgagaaaatccctaatggtagctcaggctttctttgagtcacgcaaccctctaggagcttcagggcctagccgcatttacccttcacacagtcatgaaaagcgactattaaccagccatttcagcggagaaaaaaaaaacagagggtcagtcagacaaaatgtccaacccacacagcaaggaagaggccaagctgtcccctgggtccctgtagccatgtctgtcactattgtgatatcaaaaagatgttggggggggggggtcacagaggacagacacttggcatatggtgatcaagattcaaagtgattggcccatgcctttaaccccagcactgtgagttcaaagctagcctggtccccatgtgagttccagggctaccgagtgaggctctgagggtttgtagacagttagtgttactggagggttagtgtttctgcagagatatggccactggttaagttgttcatgctccaagaagggacctgacaaccaagcttaagaaacagatgctagggctggtgagatggctgagcaggtaagagcactgactgctcttctgaaggtcttgagttcaaatcccagcaaccacatggtggcttacaaccacccataatgaaaaaaaaaacaaagaaagaaagagatgctagtggggcagcctttaatcccagcactggggaggcagaggcagatggatctttgagttcaaggtcagcctggtctacacagggagttccaggacagccagggctacacagagaagctctgtctcaaaaaactaaaagagagagagagagaaactctaatacactgagtgggtcattcacaaaacagccatgaaactaagaggaagatgaacttcaaaagacagccagcagctgagagggcactggggggggggggggataaaatactaaaattcactctgtacatgaatgaaactgtccatgcacacaaataaatacacagccactcacaagctaaacaaataataatactacgttgtactggtttggtccccagccccaccagtgggaggggtaggcacagcatcacagccttcagaaaaaggcagagggacactggaaagcactaaccaccgacgtgaccaggcagaactgctgaacatgctcccagaagcacggccgtaacccaggagacaggaaggtaccagatccaaggaacagagtcgctggcaaccaggtaaaggccgatggaaccatccagaaccagactcttcaagaaaagacaaaggagatctgggcgggagacgttcccaattataaactgtatccacagaacgggaggcagacagtctaaaacacaatccgatccaaaaaaacaaaaaccttgaaaactccagaaaatataagttgattttattacaccattgactctaggcacaacaggcacaaaacttacaaagccatagtaaaaacaaaacaaaacaaaacaaaacaaacaaacaaaaaaaactggcttaaataaaacagtagtgttgccggccgaggctcctttaattccagtgatgaagaggcagagggatgctctgtgagttcgaggccagcctggtctatagagtaagttccaggacagccagggctacacagagaaagcctgtctcttaaaacattaaaataaaacaaaaatttcccttgtatctcatatatatcaagagaagggaatagaaccgggtaagaggttaaagaaacctcacttaccataataataaacatctgcaaggcccctattgcatatcagacgcagtgttaaatgctttatttgcaacacttaatccttgaaccggatctccgagtatcctattatcataccccattttatttcactttgcatatgtgcactataggcgtttctgcgtgtatatgcatgtgtcacatgcttacagggtctgcagaggccagacacagagtcagactctgcagaactaggagtcaaaatggtgtgagctcttgtgtaggtgttggaaatcgaacccagatcctccgcaagagcaacagatgctctttacccgccgagccatttctccagcccacccatttcattttttcaatgctacacttttttcttttctattctctttaaaaaaaaaaaaatcctttggcttttttcaggacagggtttctctgtgtagccctggctatgcttgaactcactctgtagaccaggctggaccagaactcagagatcggcctgcctctgcctcctgagagctgagattataggccaccacacctaacttgttttgtttctgtgattacatagcacaggcaaacctgaactcactatatacccaagggatcatgctcttgcactactcagtcaagagatccatctgcctttgcgtcctaagtactaaaattacaggcacatacgcaccaccatgacagttaatatgacttagtcaaatccaaagcatcatgcatgctatgagctacatgctcctcctgctttggttggtgttgtactttgaactttttgagacagggtctcattatttagtggcactggaactctctcattatatagtccatgctagcctccaattcaatagcgatccctgtctcccaagggctgggactaaaggcctaccccactgggtgtggcagccttgaagcctaaagattacaagtttgaggcaaatctgagctctactgaatcccaacctgggccacacaggaagacccttaaaaagtcaaataaaccagaaacttgagatgaaagcaaccaagtctgggtgtgtggggatggtagacatactcgtgatccaggcatttgagatgtgaaggcaagaggatcaggagttccaggctggagagatggctcagtggttaccaacactgactcctcttgcagaggtcctgagttcagttctcagcaaccacatggtggctcacaaccatctgtaatgggatttgatgccctcttctggtgtgtctgaagacagctacaatgtactcacaaaaaaaaaaaagggggggggcgggggatcaggtattcaaagctagactgagctacataacatggaagcattttagtctggctattataaaaaaaaaggggggtacaaatgaaaagcaatgaagacctggggtactgctcagaggtagctccaaggcctctggggttgatccaccagtcccaagataaaataaaagcgtaggttgacccccggtggctaaggactatgctccaaccagagagcgttagaaggaaattccaaagccctgggagaggtgtggacgggcctgagggatctgtgagtcacccgctaatgatgtccgtaattacagcaatcactttttcagtgacttccagagggctgggcctgggtcaggcacctggcctcagcctgcctcatcaaatgtcacaaggcaaggtagcgttcagtattaattggtccactttgtagatgggaaaattgagactcacagactcatcaaaggcagaaaatcaagacttcagtctcaggcttgggcaggtgtgataggtcacagggcaagctgatggtttaagctcagtcctctggacccaagtggtcggagagaactgagtcacaccaactgtcctcttgaatatgcactgaagcatatacacatgtgcacacagaagcactcgcattcacacatacacatgcacaataagtggcaaaaagaaaagaaaaaaggaagaggaatccaaatagtgattggtcatgaacgccgttcatccctgcactcacaaagcagaggcaggcagctctctgtgagtttgaggtcaccctggtctacagagcaagttccaggaaaaacaaacaaacaaacaaactcattaaaaataaataaataagggctggagagatggctcagcagttaagagcactgactgctcttccagaggtcctgagttcaattcccagcaaccacatagtggctcacaaccatctgtaatgggatctgactgacgccctcttctggtgtgtctgaagacagctataattgtaatcactcataaataaataaataaatctttaaaaaacataataatataaataaataaataaataaataaataaatggaaataaccatcagccctagaacaggcagcctccagataaagtagcttcttatcaaaggattccaggttcagaactgctaaggaatgtgtgaaattgttagaaagggtatttgagccccagcccctcactgggggattctaggcagagctctaccactgagtcacgcccccagcccctcactgggggattccaggcaggggctctaccactgagccacgcccccagcccctccctgggggattctaggcagagctctaccactgagccacgcccccagcccctccctgggggattctaggcaggggctctaccactgagccacgcccccagcccctcactgggggattctaggcaggggctctaccactgagccacgccccagcccctcactgggggattctaggcaggggctctaccactgagccatgcccccagcccctccctgggggattctaggcaggggctctaccattgaaccatgcccccagcccctccctgggggattctaagcaggggctctaccattgagccacgcccccagccccctcactgggggattctaggcaggggctctaccactgagctgcatctcagcggtcctactttttatcttcagtcagcacctcactatgtgatagcttttacttccaccaaaggcagatatgatgcttctctgggcaagagggatggcaaggacccctggctcctggctggggatctgactcagtgacatgtgcacatgacactgggtttcactgtcagcaacacaaaaataaacaaacaaacaaacaggctcagctttagatggtgggtttttcttttgttgatgagttttgtttgtttttgagacagtccacccgtgagccaagactacaggtctatgctaccaatgcagggctgcggatcaaaccaagggtttcaccatgcatggttagtaaacattctatcaagtgaagtgaaagtcctggtccctttagttggggttggaatgcctgccgagatggcaaaaaggagtggaagcagaatcagatttggcagccagtccaccaaaaggagtcaagaccatccctaactggccacagctaagtcacatggttcacttgtagactgaggcaggatcttaagttccagattatgttctcagatatgcaggaaactgacagtccaccggggctatagcagaccctgtcttctaaatatgatatctatgtgtacatacaggtgtgtgtgcacgtgtctatttatatcaacaacaacaacaataacaacaacaaaatacaaaaacaccccaccaccccaagcgattatcatatacagtcctaaattccaagcatttaagaggatgagaatcgaaccataaattccaggccagcctgagctccataaaactcttgtcctaaaagggaaaaataaaagtcaggcgtggtggtgcacgcctttaatcccagcactctggaggcagaggcaggtggtctccttgagactgaggtcagactggtctacacagcccggcgaagtccaggccagtcagagctatacagtgaggctttgtttaaaaaaatagaaaggggatggaggtgcctcaacccaccttgtccctgttcctcccaccctatgaacatctctgaccaaaacccagggtctctttctttgtatgtatgtgtgtgtgtgcgtgtatatacatacacacacgcacacacacacacacacacacacacacacacacacagctccttccaccatgtagatcccagggaatcaaaatcaaactcaggtcctcagtttactcacaagcgcctttacccactgagccatcttatacacacacacacacacacacacacacacacacacacacacacatccttccccttgtatgcttattttggaagaatttcaactttagagaagctcaaaatagttacaatgaactaccatcaccttcgcaggctctagtcacacctcttagtttgttatctgctgttacctgccgtctcccttgacgatgccgggacacttatattgaaagtattcttttttttttccccacttgccccagccgtctgcaagacagtggcagacatggtgtccctggcccctaaattctgagtccttattcccaggaaataagaacagcatttaaacagccgaggtagcgactggtgtctggggatactgtactgactcaccgctgtgggctgatctgcggctcatattccaatctttccaattgcctccacgatcctttgagacggtttttcccttaaaccaagacctaatctcggctacacactgcctgtagccacagtcagtttttccgtttctcctaaaacactaacagctccctgcctaccttcgccttacacaccactgacttttttttttaagtccatgccagttttgtaaaatggctgtttaaaattccaagacttcattgctggttttcagggaccgggcaagatccgccccaccccatccagtctatctcccactgggctctcaaacctctgatccctcacccagcactgtctctgcattctgtcaactttctgctcttcagacacacaaaagagttcattctggggatggctgaggtcaagccctctgacctggcccttcaccccaagggccagaccagacccagggcgttttatttcctacatggcctgtgtcctcatgatttgtgtgtttattgcctggctcccacactagaaagttagccccaaggaggcgcaaagccttcagtgtgtttggttcccttacacagttccggggcccagtgcggttccctggtgagcagagaggctcttagaaaccatttgccaagcaaatgaacgggtcgatcgaagaaggaaggaaaaagcaaggcttggactggtgaagctccaaaaggcaccgccaagatgagccagagggtaaagtgacctgtggccacacctgagtctgatcccaggacctccccactgggcaggagagaaccaactccagcaagtggtcctcagacctctgcaggcaggtgtgtgcacaatgcaggctggtgtgtacacaatgcagtgcggtgtgcgcgcacactcgaacacacacacacacacacattgaaaatagaatttaaaaaaaaaaaagaagacaaacaggaggtgatcacgttaagaaccagggaacccaacgggccctcctaggttctagaaccttctccatgccttcctttactgccttctgaccaaagggagggttcaaggagaaaaaaacaaacaaacagccttatcttctcatccctcgtctccagcagccagtcctaactgattaatctttctaaatcaatcccaggaggctgacagggtggattccagagttgggagcccaaggctggttgcctattgtccaagggccaggtcaaagtgcagtacctcctgagtctacatccctgcgtcccgcccctcattcagtccagggtgtgggttcagagaaaacaagcatccagatacaagatctcgatagccacacttcacactgaaagatggatccttcccagggccccccaactccagaaatgaagtctcactgacaagctgtgaatattcactgctcaaactacagccggaccttacagcaaggggaaagaaagaagtcgtcacccctgcttcaatctgacgggtgtatgtgtgtggtgtaagggttggggtgtatgtgtatgtatggtgtgtatgtattgtggtgtgtttgcgtagtatgtggtgtggtgtggtgtggtgtgtgtgtgtgtgtgtgtgtgtgtgttttctagattttctaggctgggctgccccaattacccctgctccctctatctctgcctctgagtgctgcataggtaggtgtgagcctccatgctgacaccccgttctttatttttaatttcacctgaggaaggggctagagccctcatacaaacccacatcaacgtagaaagctttgcctacaacggaccctcacccaacagtgctgctcccctgaggtcaccaggccaagctccccctgcctactgaactttcactaggacttctgcaccccagcagccacgggcaggggcatcctccaaccggaccagcccagaggtaacaaaaaccctcttccctctaggctgcgtgaccctagcaaatcgctcagtttctctgacattttatacaaaagtaaacaaataaagaccggtctgccggtctgataaggctgccaagatctaaggagctggcagccagaaaaaaagcactgggtggtgcccctatgcaaaggtctagcacctgcaccccctgcaaagaaagccaggtgggggaggggtgtctggagtctccatccccgccagctcctccggtttgaatggggtgcagtcccatttcgtggttaatgggattaagtacggcttcagctctgggccttgacctgcggtccggtctatctgccccatctggaggtgggggacagatgggacgagtgggaagtcatagagcttcgagggcctccactcttccctctcgggcaagcaaggcctcaaggggacgactgctgtgactttcctcccatttcctccaggccctcgagctaccctgtacagaagtcgaacagctccaagcagagaaggccatgacacaggattccaaggctgcttccagctggattgcctagtctatgcctctgtcacatcatccactagatgaggggttaagcatggaaggcagtctgactatgctacgccaccaaggttggaaaatgctgtgcacttagaacgacagcagcaaggaatggctatcaacgctgctctcagccaagcctgggccagatcccaggcagacctggagcaggcgacaagctgagattcagccagccaggaacaccctgaggtcagattcccaggccacaggaggaacccctgccgccacttccagctaaaccaactaacccagagatcccaaaagtccaaaaatacacacacccataaacctccaaaggcccctctcaaacggggttggcccaaatggcctttgtatcccaaagccctccccaattcctgccttgggaatggtctgatgccccacctgggtcgcagggcaccattcctgtatgaatctggtcttgtcaccacccctaagccccaagcggacgcgcctctagttctcaaggggcacacgcacaccaggggagatgacccgggtccccgcgcccccgccggcggggatctctgctcgcccctcccccgccggcgcttcacaaaggccctttgtcccgctgagtcccggactcccaattctagaaaagttccaggagaaaaatatcaaaggcagaggctaattcggcgagccgtggtcatcctggcgggcaggggaagatactaaagtggtggctctgagcccccagggtgtccaagtcttgttccaaaggacgagggagcgagttcctggggaaatcgaccaggttttgttttgttttgttttttaaaggaagagctgaagtgttctccttaagccaagcgtagaagtgaggagcagccggggaggagggaccggcttacgaagccgccaccaggcagatctgcaggtcccagactccctgtcttccggcgcacggtgaccaagacttggctcagtcccgcctgtccctctgctccttccctgtgcagcccagggaacggtaagggattgggccttctcagccaccacctcctgcgtgtcaccatggggtaccccctgaagtcgggctctgctagagtgccggctgggttgcaccgacctatatcttccccagataaccagcgtccctaagatcttaagggttcaccacagattcaggctcctaaaactgtggtcactattctccttcattctcccacacccacccttggaggcgtggaaccgccggggacgcggctacacacagggacataacccaagacccaccagtgcttgccaagaaaaagacccatacgggagcggctgtctgtctcctggggtgtggagctgacacgctgttttcgcgcctacaggtttttatttatttatttttattttatttttgcaaactcctcttcctcaagagccctcggactgggatcccccagagtggttgtgactgcagacacttgagcctcaggaggactgagactatctggtacactagggacaggtctgtcttcctggagaccgacctctgcgctagcagctgagcgagcctcctgcacaccctggtgaaaccggacagagacgcccagctccagccgcctaggtttgacctgggctcccgccctaatatccccatcaaagctggagggtgggtgctagcacagtgcgcaacacttacccgggtgcgggtgaaggttgagaccggccatgtatttcccgggcggcgggggacctggcaagcccgaggagggcaagcgtccggcggtggccgcgcccacgcggtggctgtccatggccaagccggacagcagcggcggcggggggccgtggacggaccgctggggcccgaaatctcggccatccatcctccgcgggagtgccgcgatcagcctccccacccggcccgccggcctgcttcagtgggacttaaaagttcggcctcgatgtagtcctagtgtcctcgggtggcgggcgctccgcggcgtgcatggcggcggccagcggggcttgcgctcaaccacgggcccgcggcccggggcgcatgaaccgcccgcggtgagtcccctccgggcggctgagcggagatgaggaaggaggcgtacacggtatctttggtgagggaagaccgcggaagacacagaagagggaagggggaaaaggggaggggaaagagaaaaaaaagaaaacaagtttcagaaagtcgcctcgcccttcagggtaggagagtagcgaaccgagctggtggccagaaataaaatcgggagtagccgccccctctcctcgaaatgcgaaaacctagggtccttcctccagcagttcagggttcccagggacgtggctcagggaagcggcccggctcgctgtgtcccagccccgtctcttgcctacgaagttctccctaactggggaaggccactcaacagaccgcgcccgttcagctaaatccaaacccgtagtttatttttcaggcgtcacaagctctggaggtttaaaacttcgaatgcttttgagttggttgaaatgtgtccataacgccataccaactatctgattcgcaaagtttaatgtttaacctttttagggccctcgtctcccttttttttttctccttgtgagccgcgaataataataataataataaaaggggtgttcggtttaggggctttttgttgttgtttaccaaggtcagatacgaaacgggtttatttttaaaggaagatcaccgcccccctcctgctgcccccgttgggccattgggagtcgcagaatccgagtccccgagacgtggcattctcgcccgtgaactggaaaaagactccttcaaaacaagatttggtttcattttccaacgcccgggcctgggaataccgatgcccggagaacgtggcttggtgtggaggatttggggatcatcagagaagaaagaaggggtctccaaagatctcaattctaccctagctttgtgacccacacacccccaaaataacctacaaaggaaaaaaaataacttaacagcgcgggccagcggaggggcgcctccccagcatcgggtaaaccctcctgtaagtcctatttaagctgtttgtttaaaagatctgtcgctttcctgttcccgagggggtagggaggtctcagagagcccacccttccctccctgactaccagccccaggctactctagaccccctggttccgggagaaccggggcgctctagcagacggagactaagccacagctcccgggtgaccagccgccctacgcccagacccaaaagtcctcttcccccaactttgctaaggacgcctattttaacgtggctttggttacaacaccccctcttcctctcgcccgccctcgctctttatcaggctctggttaccagaatcgcgtttacttttgaaaaaatctaggatcgtcacagcccgggatacttgtctcaaaggcgccaggagcttcccgcatacacttaaagataatattcattaaaggcagcgttttgaaaaaggcagagcccaggcgccccactttaaggaagtcggggtgaagccctacggagcagcctttgccatggtcgagaagctggcgtggctatctgcggggttccactgcgtccttctctacttttcccctcttaaatgcagctaaaatggctgaattccggcttttaattaaaaacagcctataatcgaaaccgtctcggcgtccccgggctagcccgccgcctgccgggaaccaagtagggaaccgccgccctcggcggtgctgcagactgagagctcgggtgggagtccaaggcgcagcgatgcgtcctctccccctgatccctgccctccgcttcccttctggggaccccgactgtttcggggaccttctgctttgcggacccaaggggtacgctgcacaagttcggggagcatcggggcccggagcgtacctggcgcggcggggctccgggctccaggctccgacggcgactccggcaaccgccgcggttcctggcgcggctaggcgcccgtactgcccgccatccctcggccgccgctcccctccgccacccgcagccgcctcacactttttgcccgcctttcctttttttggtagaaaaccgctccccgggccgggcgcgcggcgcgccaactcctccgccctcccgcggccccgctcccgcagcccccggaaaagccagctttcctcccgccgagctccccgctttttaataaaatccaggtagcgccggtttaaagaatcccaaatctccatatacagcccgggattggaaaaggtacattacacaacccccctttcaagttcctctcgctggatctaaaaaaaaaaaaaaaaaaaaaaaagcgaagggggggcttaagggggacgggggaggggagcctcgcaggcgaagaaacacgcattgttcccgggtgcccgccccccccttcgggccagcccccggccgcagcgcattggtcccgctcgccgcccatcacgcgcatgtaaacaccttggccctcagccattcctataaaaccaattacggacctcggggctccagcagtttccaggctccccacggcggggctgaatgatcaaaactggtggtgagaatttttccgagccgtttctaggcagccctcccccacaccagctccagcagaccccccccttctttctccttctccctccccccacatcccagcccctcctcctgcgtctgggctgagtgatcaaaatagaggaagatggttgtcgccgcaatcccgggcattgcaaggcctcctgtcagcttccttcttcgggaggaggtgacaagctagccgggaagagccgggaaccggcgagctgctcattgcgcccgcgcccggcgctccctctctagggtgccactccaaagagcgaggttcagacgaaaaataacaaggcctgcttctctctcgcttgctcgctcactctcgccttttaaaataaagcagcgattcattccctttccccctagcagtcgcggtcgggtggggtgggcaggcaggcgacaaggccttttttttttccttttgcccctgcctgcgggtcccctccctgaaacgcggtgtcagaaggctttactgattaatattttggacaggccgcggcggtcggcagcggtgagttgcatcttataaaaggttcctatagaaacccgggctgtggggctctgcggccgagtgcgcaccgcgcgcccctccccaaagccccttttggcgtgggcgcccctccttccccctttccccgccaagaaaaaccagagcagaaaaaaggattagatcggcggaacgcgagctgaatccctctcggttctgacatttcagccctattagcatttctccacggggccttctgaaacctattaaggtgtaatattaaaaacctcttggctgggggcctctctcgccttccatccgccgcgccccctccagggagggcgagaccgggaaagggaaaaaaaaaaatctgttgagctcagaggaagcaagccaagcccaaaagtgcttggctggccacggcggccagagggggaggggagcactaatcccccagactttgtacttttattttgctctttcagcaaaaaaaaaaaaaaaaaaaaaaaaaaaactttcgaagttaagtggcagggagccgccgacggcagtctacctgactggggacccagggagtgtgatccttgccgaagggacccgttctaaagggtggggagatcccctgcaccctctcggagcccgagcccagctaggcattacctaccctggaaaggaagcttggaaagacagagagccttgcagatcctacctcgagagcaactatagggttttaattaaaacaaaagaagcccgctctttcgccctgctctgcggactcagcgttttcctgctgctgctattttttttttaagaaaatccatttttaaggcaatttttgagagtttttttttaatgagctagttagtgctcatccgttctatttttctttcctccacttttagaaggaaaaaaaaagagggaagattcgagagagagctgggggtgtctaatttaattccaggataaatttgaaggggggaaaaaattcagcctcttgagagcagtttcaagttgcccttcctggagctttctgggctggtttctaggctgccctcttttagaagctggagctcggtggggggaggagagaggagggagaagagagagggagagggagagaaaagaacgaaaatagccggagctgaggggaactgagcggcggtgtccgcgcgctcggagctgggcgacggggtctcagtggcagccaggggcgaccggaggcgaccggtgctgcccggggaccggcaggagcaaagacggagagaggggggttagagaaaggaggtattgtgtctgtgtgccttaggggagggggggagttgattgcaagaaataaaataaatgctgttaagctgcgagggcttctggaaacaagagagaaacgggctgagggggtggggggcgcctagtgcccttgagtcttatccagaggcctttgtgggttcctagttaaaccctcccacgcctcagtcgctcgctttcccccaccccccaacgccctccaatattcagagcgcaggccctggtctccccccaaccccctcatccctcccgggatccagaatgtttttcttattttaatacagctcaagaaaaaatatgtatcttgagagagtcggagtggggtggggggattgtgcaaaaggcttgcggggttggaaaaaaacaaaggcctgtttttataaatgtttaatgttttcacccctggatgctccaagacgccgtaattgtgacggcggggtatgtgtgccataaatcatttagctgctaataaaaaattattccaatttgccccggatttgccgatggcgtttgcatttttcaagtgtgcgccccgtcggcgtggcataccgaccgacccagagtttcattagggctgaggttggggcggaactcgacccgctcccctctggaatgtacggctcggctccccagtcccctctcgacctgccactcggccctcaggccaccgggtgcgctgaacctggggaacggtggccccgatccctggcccccgggaggggaacactgagcaaacccctgcaactctcaaggctgccaagtacaacgtgcggtgcacaggccaggtctccttgtccctgtgtcccccacatttaacagtggtcgggagccatgttggggcgtggggacatttctagagaagcagaggctacactacaccaccacttcagagagtctccaggtctggggaaataacctccaagccgggctgggccacactttatctacaaaagccctgtatattcgtcctgaaactgagctggagacaaccgcagggaccaagagtccaagcgccatcttccgcgtcccatcccccacgcttgtttacccggtgggatccgtggccagaaaaattctgttgacgcagtgtgtgtgtgtgtgtgtgtgtgtgtgtgtgtgtgtgtgttgtactgactggagagaaaatcgtgggggacctccgcgaagtccaaggacgcaattcccgggcaacccaccgggttggcctgcctggtccggcatggttgtccccggacactcctgaggcttttggtgtattcttccagatacccggtccaggtctggaagctctggacgagtccccgcggacaaaactcaaagctctttgttgtaaaaccagaggacaggccaaccttgagtgcggctgccttccctgcggtgcgcctttgtccggctccagggaaccccgcgctcccctcacttctgccccacgaaagcttgaaccctcatcttctacaatccggaggttgttagccgtgtggacaggtttccaccatgcccctccatcaggggaacagggcgcaggagggtggggaatacaaaaagaaaaaaaaagaaaagctagttttcattcaggtgaccttctctatcggttgccgtgaaccagctctcccagggagtggaactccactggagactaagtgaccgggacgctaagagaaagccagtttgtgcctccggcgatgccaccatagagtgtaaggcggttgtttccgtagatcctaaatccggctgccccggagctcctggccggggcgccactaaaacccggagaggccatgccgggcccagccacgctcgcagtctctcgctgcggctggcccatcagcagctgggtatcctggagttcatccagccaagggtagcccacacccgccaacaaaatcaaggatgtggtgccagagccttgcacaccacctcggtccccagcgggcaactcgcagcccaggggcggtggcaccaggccacttcggatttctgctcctctcagccccgcctccgaccctggcctcctcctccggcccgggtcgggtcttacattccactgtctggcttgagatgcatttggtgcgcagggagcggctagggtcataaatctgcactctggccctcctccccgaggcagggccaggcactcttctctccttggtcatggcctgaggaccccgagaccacgcagggaagccagccaggagcttccccattcgccaaagagagggaactgcctcacccacacagtgccagcatcgggagtatcgggcctcacagatcaccggcagctggggtacggggtctgggcccaggcactttctttagtatagttcaatgaggctggggtggctgtgaggtcatttatgccaagaaggaggacctctagaccccgtattaatctcaggccctttacaagagatctactttgggggagggagcatacaagaaccgatcaaagtggctacaggcatggtatttggagacaggaccttcccttgcctccttgccaaggacaccccgaaacgcctcctttgggtccggttttcccgagcccaccacgcgccttgattctcagaaccgaaccatccagaaagcaggcattggtcatctggcgatggcggccatagcgtgactgttaaacctaaggggggtgggagggagggcgaactacccaagggagtgtatttgcggtttctaacgtctcatgctacaagaattttctttgccaaaggggcaggcaacagacgattatgctggtccctgtgagtgcatggggctcagggtggggacagctgcacgggggggggggggggggcaagcatttaccctctcggttgcttctctgtgtgtcagatgcgaggtgcagggatatggaaaccttgctctcacccacggagctcttagattcccaacgatgtctcaaaagcacttttagaggagccgagggctttgggcccggcgcagagaaatgtgagcactgacccgcgtagtagccgagcagcaagaggctgtagatccacattcccgggctagcagtccctgcaaggccccaacgaagcgcctcggaaaaacaacaaagctttgccagtttcatccaaggttaaactccaccgcaagcatttttctttttctttcttcttcctattttttttccctccctccccggaatcagagcgatagcgttactgcaaagaaaccgcaaataaatcagctcctcggcagccgctttagagctgcggtgaccttgggggggatgttttcctgctagacccgtcccagaactggcgtgggggagggggccagtgccaacccacccccccctccacacacacacacccctagagaaacagaagaggaggtggccaaggacactggtgcgtgtacattatagtgtgtgtgcccccgtgaggagtttggaaagaggtcaggggtactgtggttatttaaggaggagagtgtccggtaataggggggttgctgctgcggaaaaggcctgtgtaccccaggctgcgctgcccactcccacccccgcaaacgccaagctagtccctggggaatggggaacaaacccccgatggacaaacgaggcctctttggggacctctggtctttgtctgggtgtgaccgggtgtgttccgcagccagtttgtgcggggtgtgactaatcggatttctgtgtgtgagtgccggggtgactaatggagggcttggcagcacgtgtgtttggggaggggcactgcacctaggtggggacttggtgccccaggagggggctgcctggtctcagaagttccttcccttcccccttccttctggctcccagctttgtttgggcctttgcggggctgcctggcaggcccgtgcatgctagggagcaatggctcaaattccacagcatgcctggcgcccagaggcagctcctggcctcccgcctccctcacccacgtggtgcctccaaatctgggctggccgctaccaaattggggctgtcccaccccttgtagctgagccctcccagctttttctatgttgctcggggaagccaccgcagagctccgtgatttgtgatactgtcctaaaaggattcatggagatggcggaggtcacagccacacaccaaggaagtcgcttaggctgggagtttgggctctctttggacctttttccccacttctgctgctgtaaatggaatccagccactcacacaccacacaaggtagtcaagagctccatccaactctaggcctcagctctatctcgaccccaggccattggagccttgagggtggccgtggttcagacttacaagcgcggcgctccaaaggcttcccaggccagccaaggcttcatagtgaaaccttgttccataaggaggaaaataagtaaaactctagttttcatttattttctagttatttgtgatggtatatagctatcctccagagcctgggaggtggaagtcggcggaacacgagttcaaggtcatcctgtgctgtctaacaaaccgagggaggcctgcagttcagtcaatcagcctctctccctctcaaaaaaatcaataaacggggccagcaagatggctcagtagataaaggctcttgccaccaagactgatgatctgagggccagcctgggaagccgggtagtcagaagagaatggccttgcagacatgctccatatacacacagcagatgagagctttttaaatgtgtgtgtgtgtgtgtgtgtgtgtgtgtgtgtgtgtgtgtgtgtgtgaaacatattttttttaaccagaaaaaaaccgagattctctagtgggtagggatgggcgtggttataaaggcgggtgcagctctccataccgcccaggaccccagggcagattaatttggaggtccaaacacctggataatcaatcacacataccatctctcaattccacagcctctctcttgctggtaggctgctgtgtctagtgtctttgccaggcagagacacactcatcaagaaggcccctaagacccaaggaagtgggggcaatctaagtaaggtcactctcccccccccagtcaagaaagagatgggggggtgactctgaccatatctcctgagccagtacatttccagctctctctctctctctctctctctctctctctctctctctctccccacctcactccccctcctttttttctcctttttatctttcattagcatgcattttctttcaagcaggaaagaaaaacatttcccatggctacagctttgaaagccccctcccatctcctccccagtcggcgcccactcccctgtcaatctcttcccatcccttcccatccactgaaagccaaaaccaccaccccaccacccccaatccccaagaaagatcaaacctgatgtgacgacacgcacccttcacagcgtccaggcagtacacctctgcgtttgtacctcagagaggagggggcaggaagcaggagacccccacaaacacctgtgcgtatccagattcagcagccacaatgcatcatttctcaagaaacttctagaactgctctggccagggagaccctgcccacttgaatttttttttctttttttttttttttttctggaaaccttgattctccttcaggatgccccctgcaccactctactcccctgatacagctccctcttctggggggctctgttataggttgagtgcccccccacccccacccctaattcctgtgtgtggaagcaatctcctcaaaattgaaaacattctgtcacacagggaagctgtgggctctgaggcacataaagcaaagccgacctaaaataaaaacataaccttacacaagtcacagggcactttcccaaggtccgaggagtaacggtccacagggctgtctgaaggtcactcctgcatgtaacccctgtacatctgaccaataaactccttggttcaccaaggtgggcttcaccgtggtcgatacctgtgtgagtggatgggggagtgtagtgtatgcgcagggatgtaggtgcctggagccacctcccctactgctctctgccttatacccttgagacagagtctctcttcctgtatctagagctaggctggctgcataccagcccccaagcaatcctttggtctccacccggactcacacactccctagaacaaaggttctggatacctcaggtgctcctgcctgtgcagcgaaacctcttacccccactgagcagtcagctcctgttactttgacccactgtcagagttctgtctgggacaagttaatttcacattatgttagagcaacaatacttaagaatgaccttatatggaaataggcgctttccagagcatggtagtacaggcctgtcacactagcaattcgaggcaggggaaccacaaatccaagacaaaacctgagctgcctagagagactccggaaacaaaattaccattttaaccttttgtgtgcggaggggtgcatgttcatgcagaggtgtgtacatgtgtgtggtggcctgaagttgtcaccaagtgtggtggtgatttgaataggtatggcccccatagactgctgtgtgaatgcttggcccattggaggcgtggccttggagtgggtgtggccttagtgggagaaagtgtatcaatgcaggggcaagctttaaggtctcctattctcaaactatgcccagagtggcacacagtccccttctgctgcctgctgatcaagatgtagaactctcagctccttctccagcaccatgtctgcctgcaggctgccatgcttcccgccatgatgataatggactggacctctgaactgtaagccagccccaagtaaatgctttcctttataagagttgccttggtcatggtgtctcttgacaacaataaaaccttaaacaagtgtctttgtgctctgtgcacgttatctatatgggcaggatctgctaggcatgtttaattccagcactgaggagacaaaggcaggtagagctctgtgagtttgaggccagcctggtctacagagcaagttccaggatagccagggttacatggagaaatgggaggcagggaggtggggatgggcaagatctctcactgagccttgatctgagtcttgcccaggaatcctcgatttactaaccttggagtcttggattgcaggcagctggcacagctgcttctgggcacccaagctcctcccactctcagtgctgtgccttatctggagttatctccccaactccttctttaaccagtttttttggttggttggttagttgttttgttttgttttggtgggggggggtggagacagggtctcactatgtagactaggccagccttgaactcacaagtgatctgtctgcttctgcctcacaaatgctgggattaaaggtttgtaccactacgttcagcttagctagtttttaaattttttaatatttatttttttatttatggtgtatgtgtgttcacagagtatgcacatgccacagtgcgaatctggaggtcagaggagaaactgcagacgaggcttcttattctaccatggaggtgcctaatatcaaactctggttgtcaggctttgtggcaaagacagagacatggcactggcttgccattttaaccacttttgtttatataaaacttttatttatttatttatgtatatgaatacactgtaactgtcctcaggcacaccagaagagggcgtcagatcccattgcagatggttgtgagccaccatgtggttgttgggaattgaactcaggacctctagaagagcagtcagtgctcttaaccactgagccatctctccagcccattttaaccattttaaaaacactttctttgtatttgttttaattatatgccccccgtatgtgtttttgtgcatgggagtgtgtatggatgtatgtatgagggtatgtgtgtgtgtgtgtgggtgtatatatggatatgtgttggatgtatgtatgagggtgtgtgtgtgtatgactgtgtataggtgtatgtatgagggtgtgtgtgtatgagtgtgtgtgtatgggagtttatgtgtatgtatatatgtgtactgtatgtgtatgggtgtatgtatgagggtgtgtgtgtatgggtgtatatatgggtatgtgttgggtgtatgtatgaggggggtgtgtatgattgtgtgtatgggtgtatgtatgagggtgtgtgtgtatgagtgtgtgtgtatgggagtttatgtgtatgtatatatgtgtattgtatgtgtatgggtgtatgtatgagggtgtgtgtgtgtatgagggtgtatgtgtatgtatatatgtgtgtgtgtgtttgggtgtatatatggttatgtgtgtgggtgtatgtatgagagtgtgtgtgtgttgggtgtatatatggttatgtgtgtggttgtatgtatgagagtgtgtgtgtgtttgggtgttgtgtgtatgagtgtgtgtatgggggtttatatgtgtgtgtatatatgtgattgaatgtgtgtatgggtctgtgtttatgtgtgtatgtttatatgtgcctgctttttaacaattttcaatttgttcaattttaccaataaagactcaggagccagatgctggggtgaaagcctactagctcagagaggcagagaaagcacccagctgacctttctcctcagctgatgtcccagaaggaatgttctctttcctgctggttcaaaaaaaccacccttcaagcgaagtgaccctccctcctccttcctgtatctctccactcatcttcctgactccctctcactctctatgttttttttcttttcttttttcttttttttttggggggggggagggggagaggggttcgagacagggtttctctccctggctgttctggaactcactctgtagaccaggctggcctcgaactcagaaatccacctgcctctgcctcccaagtgctggaattaaaggcgtgccccagcactgcccagcttggctttttcttaataatcctaccttcacttcttgtcaactggttgcttaccctgcctcttgacctgtggctgactttatttaatcctgtttacaatattcaagcagaaagctcttggattaaatgtctaaaccacattacaactagaaacaggtttttccaataaataatacaatctttgggttcacagtagaaatatcctgcaacgtgtgtgtgtgtgtgtgtgtgtgtatccatatccatacacacacacacacatgatgcagaatatttatatatacatgtatgtgtgtgtgtgtgtgtgagaatgcatgcatatgggtatgtgtatgggagtggtataggtatggctgtgtggggtggtatggatgtgtgctcgggtggggaggtgggtaaaggtgtgtgattgtgtgggggagagagatgtgtgtgggcatggatgtggggagtatggatgggtatgtgtgtgggtgtgagccacctgtcctgggtgctgggaactgaacctaggtcctatgcaaaagctctaagtgctgcttacccactgagctgtctctgcagccctacatgttagccattttaaaacacatgtgcatgggttatgggtttatggtattgtaaagccatcactagcatccatccagagagctcactcatcctcccaagctgaacctctgttgccattaactacagtcccttctacacacacacacacacacacacacacacacacactaactacagtcccttctacacacacacacacacgtacacacacacacacattaactacagtcccttctacacacacacacacacacacacacacacacacattaactacagtcccttctacacacacacacacacacacacacacacacattaactacagtcccttctacacacacacacacacacattaactacagtcccttctacacacacacacacacacacacacacacattaactacagtcccttctacacacacacacacacacacacacacacacacattaactacagtcccgtctacacacacacacacacacacacacacacacacctatcacctacggctctagtttggttttgtgagcatgcgtgtatgtacatgcctctgtgtgtgtgagtacctgccatgacctgtatagagcccaaagaccagcttctgggagtcagttccctccatccactgaggacaagctgtgcagctagcatctttacccacagatcaccttgatctctcctagaggccctgtattctttcctaactggctaatttcatgccgtacccgtggtagagcatctctcagagtgttctttttaaaactgggtgatagtctgctgtgtagatttatcacattgtgtttatttgggcatctgccccggggtgaagtcttagtctgctctgttgcggctgtaactgaatactccagagcagcctatgcacaatgacagactaaggcaggaagaatttgagtttgaaatcactctagactgtctacatagtaagaaactgtctcaaaaaaagaaaaggagccgggcagtggtggcacacgcctttaatcccagcacttgggagacagagacaggcggatttctgagttcaaggccagcctggtctacagagtgagttccagggcagccaggcagccaaggctacacagagaaaccctgtctaaaaaaggaaaaaaaagaaaagaaaaggagacagacagacaggaggggctggagaggtggctcagtggttgaagaagcactgactgctcttccagagaccctgagttcaattcccagcaaccacatggtggctcacaaccatctgtaatgagatctgatgccctcttctggtgtgtctgaagacagcgatagtgtacttacatatacataaaataaataaatcttaaaaagaaaaagaaaggaggagggacataactttgtggatcttgctctattggctatccgatagggccttcctcctgggtcatggtgaggcagtccacatttgatacacagggacagaagaactgccaaagagatcttgcttagatagcaaagccactcccagccaggcagagatctgatttaaacatacctgagatcctgacactcaggaggttgaagcataagtatgacagcttccagggtagactgggcaactaaatgaggccttgtctcaaaaggaaaaggaaaagagggctgggggcgtggctcagtggtagagcccctgcctagaatcccccagtgagggactggagtatagaaggagtgaatcatattactgttgtgtcttacaggcctacacaagccacgtgtcttagttaggggtttactgctgtgaagaaacaccatgaccaagacaactctttttttttctttttttaagatttatttatttattatatgtaagtacactgtagttgtcttcagacacaccagaagagggcatcagatcttgttatggatggttgtgagccaccatgtggttgctgggatttgaactcgagacctttggaagagcagtcagtgctcttaaccactgagccatctcaccagccccaagacaactcttataaaggcaacatttaattggagatggcttacaggttctggagttcagtccattgtcaacaaagcaaaaaacatggcagtgcccaagcagacatggtacaggaggacatgagagtcctacatctcgttccaaagcaaataggagaagactgacttccaggcagctaggatgagggtcttaagcccatgcccacagtgacacacttcctcaaacaaggctatacctcctaatagtaccactccctaggccaagcatattcaaaccactacaccatggaataaaagacatacacgcgcacacacccacacacaatagtaaaataaaacagccaagccttgtgatagacatctttaatcccagtccttgggggaggcagaggcaggcagagctttgggctagaggccagcctgatctataggacagacaaggctaaacagaaaccctgtcagaaaaaccaaagtaattaaataagacagaggccacaaaggtggctcagcagataagaatacatacagctcttgcagtggacctgagttcagttcccagctccttccataggcagctcacagctctctgtaattgcagctcaagcaatcttcttgcttcagtgagctcctgtactccctcactttcacatagccacacatgaacacatgcatgcgtgccggctccttgcctgcacaggtgagaggagagagtcctggtcccgctgatgtctctctggggctgagcgggatggccgctgagtgtcgacaacccaaaagaaacacactgagccgggagtcttgtcaaaataggaattgaactttatggcatcagcctcttgcttatataagttcggaacatatggagggggattttggttgggtaagatgacataggaggcagggaagagtgacagagggtatggagtgactgacagggtcaatggcaaagctctacatcagaaatggcggggcagaagcaaggccaaacaggtcttgctgagtcaccccaatatggagtgactgagacaggtctcaaaactccaaccaggctcaggtttgtcctcaaggcccaaaccagggccaaaaatggcccaacatctcccccttttgtttttgtaatgagcaggttacatggctcctgtcttaggttgtccaccacatggggatcttacccatctctggataccatgtgtcactctggctcaaaaaagggggatgctccacaacctgtcttagcacatctgtgttgtctcagcacatctgagatcttacttgtcgttggtcaagtggggagatgaggagggggactcataggcagagggatatggagagcctggctcgaaagagacaagtctttgttgatagacctcaacttgatgaagccggactgcctctagcttctgatggacaaattgaatgagtgtattgagcacacatgtcccgacagtcaagataaggagaagagggctggtgagatggctcagtgggttagagcacccaactgctcttccgaaggtgcagagttcggatcccagcaaccacatggtggctcacaaccatccgtaacaagatctgaccccctcttctggagtgtctgaagacagctacaatgtacttacatataataaataaataaataaatctttaaaaaaaaaaagataaggagaagaaggaaggggccaaggaggggggaggaaatagggtaataggccatgaaatccagtccacaatgggttgtcttgggactctcttcgcctcctttctaggtcttcctgaagcttctttatcttgttttggaggatccaggatcgatttgcatggaagcagcattttccccacttttgaatggggacactgttggggtccgcaaccagatgtgcgaccttggtgccacagtcaacagtctgtagggtggcacctcccaggccataggcgtctcctttacagtcacagggattacccggctgtgttttgaggatctctcgtgcttcttgggggtcaccgaatcctccctcagtcaagatggggagcagcctccatgcccgcagcagggctgttttcttgatcatcttggcctcctgagggagaagcataggaggtttcttggggcaggtagactctgtggaaatgtctttgtcagcctccccttgttgaggcatacactttatatctctggccggtatccacattggtcttttttcactttggggaaatatgcagccgagtcccctcctggctgtcccagagtgggtctggtcctctccaggctcctgtcagggggtccctcctccttctgactcttatggagctacaggagatggaggaggtccaatgtctttgaaatggagacaactgaggattttcttttgaaagatttaaaatatttcaagtgagtaatgcctttttttagctgatcatgtgggggtaaagactccccctattgtttttgtaactgagattttaaagcttgattttgtctttcgacaattgcggttgtaagggatgccggtagtgtgggagatctactgcagacaatgagctctggagttctctgccagatcaccacgcagcttagcaggtctaaagtctctcttccggatccttcttacccatagccttagggagggaggggcagctctttagctcttaggtaataaggaggggccttgtgcatctgctaaatttcacagactccatgagacttgtatgttgcttacttcctgagtcccaaggagcctccctcccctgcagaatgtttcaactgggaaaaaattgctacactccaggacactgccaacacagccctcctccaagactgactagaatccgggaaatcttacgcttttatggcctcatgggactgagtcccccgttgcttacatggacagcccacattcaggttgacagcagatgtggtatctggtgagacagcttcctgacttgcaaaagttttatctctttgcacattcacagtactgaggtcagaattatgggcctctggcctagctttcatgccccaggcccagagcattcaaccaatgagccagagagggccttgtctttccagtttctgtggttcactgcctagcaaactcctattcatccctgaaaaccctaccatggtggactgaaattgtttgaaatgaagagctacaataagtctttcttaagtcatcaggtattttgtctcaccagttcagagaagtcacacactgtccccttgtggggtttttaggatgtcagcaccggaatttggaggggagataacagacccctgcccttcgtgtagccctttcccaggagatttcagtgagtttctatgtaatgagggaagtgtatgaaaagaagtttgttaggcagtggagacccagagtgccagaagctaaagggacaggtccttcctggctcactgtttagatgctggacctggggtgacagtgcattgaacctaccattccagacagctgtgcctcagggtattatcaaggccctgcatgcccagacttgggggatccagggccctccagcctctgcccgtaggagcccagcttgattaatacaggcattggcttccctgttcacaactggatgacttaagcagtgttcaggcagactttgttaacgtgaaggtattctttacggatgcttggggctggctctcttctgtcaacaatcttgtcttcctcaagatactgaagggtagctcatttcaccactctcagtggtggctgtggagacccttgagaggtcaactctagcaggagggggtggagttcattgccaataagggaagggaagatgggtaagaagcaaggactttacctagggacaaatccaacctgactcctgctgggctctccactcagtcttctcatctgaaaaatgggtaaatgggttatgtgagtgcatacctgcatgtgtgtgtgtgtgtgtgtgtgtgtgtgtgtgtgtgtgtgtaggatcatatagtctcatccacgtctgtgtgaaccagagcctgcctggagtccatcctcccctattcctgggatgtgccacagttctgagactatgaccccaaacttctttaacactcttcctactatcaaatgagcatctgtgatctcatcactggttcagtgaagaaggggagagcctaagactactctctgctacctgtagagttagaagccaggccagctcccgctgcttaagaccttgtgtgaaaaaggaaaaacagcagtaacatcagggctacttggatacaatgtgttgctatggggccattggtttggtaaccaagacagttactacgtgaataacagaaaagtaacatacacacatcataagctgctaagagagaatccatggctgggaggtgatgtcacatgcctttgataccaggacttgggaggcagaggcaggcagatctctgagttcgaggccagcctggtctacacagagaaaccctgactaaaaatgcccaaaataaataaatcaccctgtctcaaaagaatagtaatagtactaataataacaataataataataggaggaagagaagaagaagaagaagaagaagaagaagaagaagaagaagaagaagaagaaggaagaagaagaaggaggaggaggaggaagaagaagaagaagaaaggaaaggagggagggaggaagggaggaaggaagaaaaagaaagaaagaaagaaagaaagaaagaaagaaagaaagaaagaaagaaagaaagaaagaaagacatgtcctggtctggggagaataggacatacagaatgcaatttaaaatgtagaaatgggagctggagagatggctcagcggttaagagcactgactgctcttccagaggtcctgagttcaaatcccagcaaccacatggtggctcacaaccatctgtaatgacatctgacgccctcttctggagtgtctgaagacagtgacagtgtacttacataaaataaataaataaataaataaataaataaataggccagagtggccagagcaagcagagctggagtgggccagggaaaaaaagattataaaatgtagaaatggaagctagaagtggtagcacacacatctttaaatcctagctactaagaaggcagagacaggcagatctctgtgagtttgtgagtctgttctatatagggagttttagaccagtcagagttacacagtgagattttgtctcaaaaacaaagaaacaaaaaaacccaactaacttttatttctggaatttcagactttggtcaagggacaaggtctcaaaataaataaaaatgtacagcactcacgagggagaggcagggtttcaaagttatccttggctacacagctgttcaagacaccaagacaagcctaagctacaagagaacctgtctaacacacacacacacacacacacacacacacacacacacatacacacacacacacacacacacacacacacatgcacacacacacacatacacacacacacgcacacacacacacacgcacacatgcacacatacacacacacacgcgcacacacacacacacacacacacacacacacgtaaagccaggcctggtgtcaaacacctgtgatcccagccctttgcaaaggctgcaggagagctgagaatttaggtcagcactgactggataaaagcaccttttacctagtctgagctgggagagtcactccatcagatgtagctagtctaggtcctcagaaacaggagccaacaagaagcttccctcagtgcaccctgcccccaacgctaaacaccagcccagccacccccactggacgccagcagctcagacagagcctggaggcccaggccggactggcctgaggcctgcttttggacagctgctgtgcctcagtatcatctgcagacagcacctgggctagccacgctccccttgccctatttacacttgtttatttctttagagccagaatcggataatcctcctgcctcctgtttcaggttacaggagcataccacgccctattcttttttttttttttttttttctttttggtttttcaagacagggtttctcccttggctgtcctggaacttgcttgatagaccaggctggcctcaaactcagagatcttcctgcctctgcctctgcctctgcctctgcctctgcctctgcctctgcctctgcctctgcctctgcctctgcctctgcctctgcctctgcctctgcctctgcctctgcctctgcctctgcctctgcctctgcctcctaaattagaatcatgagtcaccaccaccaccacccccaccacccagatttttttttttaagatagcatcttactatgtagcccttggctggcctggaactcctgcctctgcttctgactcaagagtgctaggactaaaggtgtgtgctaccgtaagcaggcctaaggtttattttattctttcttttttgttttttttaaagatttattttatttattatatgtaagtacactgtagctgtcttcagacaccccagaagagggcatcagatctcactacggatggttgtgaaccatcatgtggttgctgggatttgaactcagaacctttggaagagcagtcagtgctcttaaccgctgagccatctctccagccctattttattatttctatttatgtgtatatgtgtgtagggggtgagatttgtaaaagtggagatgctcatggaagcctgaggaggccatcagatcccctggagttggaattacaggttgttaacgccctgaggtgggtgctgggaactgtagtcctctggaggagcagcaaactgtcttaactactaagccatctccccagcccccattcctggcgtctttataagtctctctccaccctgaaggaggaaatagccagatcacagatggcatcctagagagtgtcatgtccacctggagtttcccagtggtgcttggtgtggaaagaatcttatagacaccattggccagtcattctgtggagactgaggtcctgcagaagtgaatacacacactcctacaggaatgccagtcacaacagcagagggaaacagccacaaaccaaagagagggacagaggctcggaagaatttattctgggcacccccaaaagtgacctgcggaaggctggagatgtggctccattggtagagtcccagcctaggatgtacaaagaatccagtttccttagcacctcgtaagccaggtaaggtgattgacagctgcaatcacagcactgaggaggtggagcccggagagtgggaattcaaggccatccttggctatgtaataagttggaggacagcctaggctacagaagaccccccctcagagaataaaaacagtcgggtatggtgatacacgcctgggaagcagaggtaggtggatctctgagttgggcctggcctatatagtaacttccaggacagccagggtcatgcagggagaccttgacttcaaaaaccaacagaaaatgatgcccatgacctatctgctctctagcttcctgaactatgagaccatcccttgctactgtccaaagtcactcaggtgtgcctaccctcctccgaggctgctctctgagaacagagatgacttgaccaagaactgcctgatcttggactttattccctgcactgcagtacccatccgtccctgttggtgaccttgatggacacagtattttttctaaatacatttatttgagcctatcctcatctctctcacccaagcagagagtctgagagaggacactctggctgcaggagcacagggctgaggaaggagggagttttgttcctagtttgttagtgttttgttttcttttattacattttaattttatgatatatttgtgtgcatacactcaaagaggacaacttgagggagttggttctctccctccatcatgtgcttgggcattaaactcatgttgtcaagcttggcagcaagtgtctttacttattgagccatcttgcttaatataaggtctcactttatagctcaagctggccttgaccttgtagccatcctcctgcctcagccttacaagtgttggagttaacaggcatgatctaccatgccctgcttatggtgtcctcacttgctctctagggccgagctggaagaaagtcttcacggcattggatggatggatgcatggatgcgtggatgcatggacagatagatgaatggtcagatgaacagacagatggatgggtgcatgcatgcatggatacacagatgcatggatggatggatagatagatggatggtcaggcagacagaaagatgcatgggtacatggatggatggatggatagatacatggatccatggacagatggatggatggatggatggatggatggatggatggatggtcaggtagtcagatggaaggatgcatccatgcatggatggatgggtggatgcatgggtgcatggatggacaaacggatagatggatggtcatacaaaaagatagatgcatgggtacatggatggatgatggatggatggatacatccatggatgaatggatacatggatgcatggacagatggacagatggatgaatggtcagatgaacagacagatggatgggtacatggatacatcgatggatggatggatacacagatgcatggatggatggatggatggatggatggatggatggagagacacatgaatccatggacagatgtatggatggtcaggtaaacagatgaacggatgcatgcatgtatgaatgggggtggatggatgtacaaatggatagatggatagtcagaaaaaaagatagatgcatgggtacatggatggatggtggatggatagacagacagatagatgcacggatggataaatggatggatgcatggatgagtaagtgggttgatgggtagataggtgagtgggtcagtggatagatggacaggttaatggatagatggttaattaagtagaccgatggatgggtagatgtatggaatctgtcatactatgtcctgcctctctgctagagcctgggcactgcaggcatgctgctcaggggaggcagaatgaagtccaaaaggggttcacagtccatgtcttcctttgccaggccagaaagggaaacagcagagtctggaatgaatgctgtggctcctggtctcagatagatgaatggtcagatgaacagacagatggatgggtgcatgcatggatggatggatagatacatggatccatggacagatggatggatggatggtctcctggtctcctctctgggtacccaggcgccaaaggtgtaatctgtgagtcaggaatgagggtctgctgtctgcacttctccttggtgtgtgtgtgtgtgtgtgtgtgtgtgtgtgtgtgtgtgtgtgtgtgtgtgtctgagtcctggacagggagggaatgcagaatctggaacaggcagaaccagtttgattgggagcactgggccagggagtacctgaggggctggaggacagaaggccatccctgaggcgatcctaaatgcagcagctcttgcttgcgcatatggctttatttggtggtggatgtgaatgcaaaccctttattcagagcaaacctttcgcaggaatacctaggaagggaaggtcattggctgaaggctcggggctatctggatacctcattagcatggagaagaactccagatgttgtgtgctctctgacccagaggccatggtcctcagtggggtgtcatggttacaggtttcagagcaagtatacagacaggtccactccaactggtctcagatctctgagattcctggggtctgagctcacccagccttgccagttcttatgtctgtctgggaacacagttccacatgcccgacagatatttagtaggtagggagacagatgggggaatgaaaggatagatggacagtggatagatgaacggattgatagatgggtggtttggtgggtggacagatggatggatagatgatgaacggacatataggcaacagaatggatagataggcagacaatggggaggtgtgctgtctccaccttcgaaagtgctagaataatagccctgcactctgcctattttatacgatactgtagatcaacaagtatcaacccttcccagtggctggggctcgggggtggggacacatcctcccaaagctttgcacttaggttccaggaaaaggcagaagttggttcttacagtgagaagccaggcccttcctgctcctgattaagccccagggaccatagcaaccaccaaacaagacgtgcattcccctagaaagttcagggacggagtagaagctgctgttgtgatccaaataccacttactgtgtggttgcttcactttttggcatggctaagaattcatttaagaacagtgtgggcctcatggggactgagaaagacctcacactgaggccccaagccagaaacttgccagactctcagggagatgaatagggttgagagaccctagtatccggtgagtgttctggtctctccagcccatgatgactgagaaccaaaaaagcgtgagtcctagattcagagctcagagttcagggggccacatcaggaggtccatgcgggccagaagaaggcagatctggctctgtgtggactgatggtgaggttaagatgaagcctccctgtgcccggcctaccagggtaaatagcttcctactagagatacttggagccctgaaaaacaagagcagccatgagctgggtgtgtggtgaagggtggtgcacagcctttaatcccagcacttgggaggcagaggcaggtggatttcttgagtttcaggccagcctggtctacagagtgagttccaggacagccagggctacacagagaaaccctgtctcagaaaagccaaccaaccaatcaaaacaaagccaagaacagtccctgtgttacaccctgctccaggccagccttagtcacaatttcacaaagagaacaaaccccatgactcatccagaccacctggagccctgttaattctccacagcagggaaagggatacttcccttcctctttgttgtcctgggctgtgcgcacgctgatggctgatggtaggtcgctcctgtccacagcagacagttttacctgtagcagtctgggatgatcgctcttagtgcttagaagagacctggggggagaggggcctcagcgccccccaccatctttatggttcctctggattctgcggactttggtgacacctgctggccacttgccctgtctctatagcgaccacagcagaggctcccagcacctccatgaagctgatatggggaagggtcacctaggtgattggtggcagacagggtgaagggtcacagcttcttgggtctgtcccctgctgtcttgatcctctattacaaaaatcaggaaagtacaggggggctccgttgataacctgcttacttagcacgcacactttctggattgggtccccataagccatgcacagtgctgcatacccataacccccccccaacttgggaagtagaggcaagagaattagaaattccaggtttggctggtgagatggctcaggggtaagagcactgacttctcttacgaaggtcctgagttcaattcccagcaaaaacatggtggctcacaaccacccataatgggatctgactccctcttcttgtgcctttggagtcagctacagtgtacttatttgttttttgtttgtttatttttcgagacagggtttctctgtagagccctggctgtcctggaactcactctgtagaccaggctggcctcaaactcagaaatccacctgcctctgcctcccgagtgctgggattaaaggcgtgcgccaccatgcccggcttacagtgtacttatgtataataataaataaatctttgggccagagcgagcggggttgatcagagagagccaaggtcctagaattcaattcccaacaagcacatgaaggctcacagccatatgtacagctacagtgtactcacatacattaaataaataaataaatcttgaaaaacaaacaaaaaacgaaaaccaaaaagtttcctggtcatccttggctacatagatcaaggccagcctgggctacatgagaccatcccagagaggctaccttcaaagcagcagctagctagctatgaacctggtctatctcccctgtgagtcttctgacagagagaaagggcacagaggcaccgtgtcactttgtaggtttcagggacgaagctcacacggtatcaggcttagtaaagctcctcacctgcctcgaggcctgcatcctctctgccttttttttttttaatataagatttatttatttatttatttatttatttatttatttatttaatgtaagtacactgtagctgtcttcagacactccagaagagggcatcagatctcagtacagatagttgtgagccaccatatggatgctgggatttgaactcaggaccttcggaagagcattcagtactcttaaccgctgagccatctctccagcccctctctgcctgtcttacgttcacctgtggccttttcacctgcatcagggcctcagctgccccacctacaccggacagtgtgagcttaaaggatgttgatggttgggtagtgaccatggggccaacctcttctctttgttgggccacacctagggatttgtctctctgtgattttgttctgggccatcaactcagaggcgtgatgtgtaaatgagttacaagtgcaggtgatggcccccaaagtctcaaactaagctgacttagctgaccttagaagaagctgccaacatgggaaggagggtccaggatgagctgtctacttgccactgaattctgcacatgtgacagatcactctaccctccccctttccctagaaaagcccagggtgttaggaagctggacagcccacacatacagcctcactgcgcatgctcgggcaaggcagtaaacaagtgggttttacggggcctgcggccgcacccgcttcccgcactggaccacatcaggttaggggctcatgtatagtgaccgtcactccagagggtagcctgcacctgtaatcccagcaccagggaggcagagccaggcgatctgagttcaaggccaacctggtctacagagcgagttccagtacagccagggctacagagagaaaccctgtctcgaagaaaaaatttgtttaagttgcatgcatttacttctgtgggtgtatgtgtatgactgtccttaggtattactgcgcacatgcaaaagtcagggcaacctgtaggggtcgctgctctctccaccgagtcaccttgtaggtttcagggacgaagctcacatggtatcaggcttggtaaagctcctcgcctgcctagccaccttgcagcacagtcatctctcctttttgtcactgagacggagtcccacagtatggctgggataaccttgaatttgtcataatctggccttggcctcctcccaaactgtgggacgagggatgtgtctacctgtccaccaagtgggctttcccctctgtttctttctctttttgtccctctgttaatctgttcagttgggttgtgttgggaacttaaaaagggggcctgaggggagtgggggaagggaaagacccacaccccgccagagttccacctattctctggtccgtcaggcgtgggagggctgctacctaccctttctactcatatctgggtgggcattcctctattccactcttcagggggtggccaaggggcaaccctacctggggccagagttccaggagcatgagggaacgcctaccttgtcatgaaggtgaattatcaccaccagggttcagacctcagctcaactggagaccagcctgcaattccccacagggttgtgtcctttggaaggtgctgagcatagaacttaacagtcttgtctaagtgaagaaacgttttatcacagagcaatgcccccagcccctcactaggggattctaggcaggggctctaccacagagccacacccccagctcctcactgagggactctaggcaggagctccaccactgagccacaacccagcccctcactggaggattctaggcaggggctctaccactgagccacacccagcccctcactgggggattctaggcaggagctctaccacagagccacgcccccagcccatcactgggggactctaggcaggggctctaccactgggccacgcctcagccatcactaggggattctgggcaggggctctaccacagagccacgcccccagcccatcactgggggactctaggcaggggctctaccacagagccacgcccccagcccatcactgggggattccaggcaggggctctaccacagagccacgcccccagcccatcactgggggactctaggcaggggctctaccactgggccacgcctcagccatcactaggggattctgggcaggggctctaccactgagccacaccccagcccctccttgggggattccaggcaggggctctaccactgagccacgcctactatgtgttactgaggaatgctaagtaagcacttcacagctgagccactcccccaacctttaaccttttaaaaaactgtagtataaaacacataccatacagtttcttttttgtttgtttgtttttgagacagggtcttactatgttagctgtggttgtcctggaactcactatgcagaccaggctgacctcaaactcagatatccttctgggatcgaaggtgtgcgccactgtacttggctgccatacggtttcttactttaaccatggataagtgcctacttcccaaactgtaaccctgtccctattaaacctctccccagcccctggcacccagaattctattttttgtgtacacaaattggaggactcctgggatcccctatgagtgggattcaggtctatattgttccacttagccatgtatccccaagatttcacttacatggcagcatgtgtcaaaattttcaaggtcaccctcagctacatcatgaggctagcctggactacatgagactgtgcctcaaaaaacaaacagcacgaaaaaacaaacagcacgggctggcgagatggctcagtggttaagagcgccgactgctcttctgaaggtcctgagttcaaatcccagcaaccacatggtggctcacaaccatccgtaacgaaatcggatgccctcttctggagtatctgaggacagctatagtgtacttatgtataataataaataaatcttaaaaaaaaaaaagccgggcgtggtggtgcacacctttaatcccagcactcgagttctgagttctgagttctgagttcgaggccagcctggtctacaaagtaagttccaggacagccagggctacacagagaaaccctgtctcaaaaaacaaaaacaaacaaactaacaaacaacaacaacaacaaaacagcacaaacctaaaccaaaaaagaggcacctgaatgctacaaggtcacttcaaggccttctgggagaaatggctacgccactgcctccttggctcctggggattgctgggcagtggtgggcacacacatttaatcgcagagctctggaggcagaggcaggcagatctcagtaacttagaggctagcctgctctacagactcagttccaggcccacaaaagctacatagtgagattggtctccaaaataagtgggtggaggttggacagacagctttaggattaaaagcactgactgctcctccagaggacctgagtgagattcccagcagccacggagcagctaacaactgtctgtaactccagttccaggagattgaacatcctcttctgggaaaacagacaagacagacagacaaaacataaaaataaattttgttttgtttttcgagacagggtttctctgtatagccttggctgtcctggaactcattttgtagaccaggctggcctagaactcagaaatctgcctgcccctgcttctcgagtgctgggattaaaggcatgcgccaccacgcccagcaaaaataaaattttttttaaaggagaatgcttttgttttaaagatttatttacttattatatgtaagtacactgtagctgtcttcagacacaccacaagagagcatcagatctcattatggatggttgtgagccatcatgtggttgctgggatttgaactcatgaccttcagaagagtagtcggagctcttaaccactgagccatctcaccagcccccaaaaataaatttttaaaaaagcaaaatcccccaaacttaaagttatttatttaatgtatatgaatacactgtagctgtcttcagacacaccagaagagggtgtcagatcccattacagatggttgtgagccaccatgtggttgctgggatttgaactcaggtattctggaagagcagccagtgctcttacccactgagccatctctccagccccaaacttaaatattttaattttttttccttttaatagctgaagagccttacatcatgcatatgtatacatttttgtttgtgtttttgtatatgcatgtgtgcctgtgtgagtctatgtgacctgtatacacgtagaatcctatgaagcagagaggaccttattacagacagatgagagctacctgtgggtgctgggaccggaacctgtgttctctgcaagtggaaccagtgctggtgctcttaactgctcagccacctctccagccccttgttttgttttttgtttttgttttgtttttttaagacagggtttctcgttttgttttttgaaacagagtcttatgtagcccaagttagcctcaaaactcactgtgtagtcaaggattaccttcagttctgaattctcctgcctccacctcccaagtgttgagccttcaggtccagtccatagcaccctagcacacaaaacctcaagcctttctcttaagctgtgtgaaaagctgtgtgccattcttgtcctcctgcaggactcttgcaggaacctcccaggcttgcagaggaggtgctggcctcattcctggaagaagaatgctctagaacacaatccggcagtccagcagtgtgtataggatggaacctgctgtgtgcactgtacaggggtgggggtgagggtggggtgggggaggtgctacagagcggagtgacaagaaagaagccagagctgaaggctgagaggagcagctaaggtctgggaaaacagctcggtctgcaaagtgcttgtcatactagcatggagatttcagtgtgatccccggaacccatctgaaggagctgggtgtggccgtgtgcgctgggagacccgaggcttcccgatactcactggccaactacctacactaattggtgagcttcaggccagtgagagacccagcctcaggagagagagagagagagagagagagagagagagagagagagagagagagagagagagagagactgaggagagagttgcagccaaagccaggttctatctctttctggatgcttttgtgcagggttcctgagttgtgtgttggcatggacgattctggaggcttctacatgatctaaagacctgaggtcttcatggggctggatgaagaagaacctagagtcagtctggtggcctagacagcagcagggtcagtcccttaaggcactaggactccccagccttaatgctgaggtctgtggccagagcaggcggtaatgaaaaggtatggtggacctcatgctaagaagaggtatgaagtttccgccctgcttctggccccactgtcttcagctacgctgcctgcgagctcgggcctgggctatgtatgtcaaggacaggacagtggggctgaggctcactgtgcagatgcttcacggtcctaggcagagagcgttggcagtagagtcagagataaagagacaaagatagatcaaaacagagatgaagagagagacagagagacagaagaagaaaggcactgatagagaaagttgagcaagtaagtctcagaggtagagcccctgcccagaatcccccagggaggggctgggggcgtggctcagtggtagagcccctgcccagaatcccctagggaggggctgggggcgtggctcagtggtagagcccctgcctagaatcccccagtgaggggctgggggcgtggctcagtggtagagcccctgcctagaatcccccagtgaggggctggaggtgtggctcagtggtagagcccctgcctagaatcccccagggagggactgggggcgtggctcagtggtagagcccctgcctagaatcccccagtgaggggctgggggcgtggctcagtggtagagcccctgcctagaatcccccagggaggggctgggggcgtggctcagtggtagagcccctgcctagaatcccctagggaggggctgggggcgtggctcagtggtagagccccttcttagaatccccggtgatggagctctgtctagtgtacatgaggccctcggttccttccctgacacagaaagcaaaatatatgtacatgggaggcagaagaatagtcttccacaaggaagagccccaaattagttacacaataccaagtggcaagccctgaaatcatatacatacaagtaacattatataaactgaacacacacagacacagacagacatcccacaacagtttaagaaattgaggccatggatctgagagagtaaagtgagtgtaccaggaaaggaaggaaggaagagaaggaagaaatggtacaattatactctaatttaaaaaaaaattttaaagtaaaataaattctgtgcatgatcagatagtttcatgtctccctgcgacagatagagagacgtttgggaaaacaaggcttccgaaggaagagataagccgtatcgctccatctcctgcagcgacgcgcaggctgctttccacagcagaggccatttctttcaaagtccttgaagtgacctcgtgggttcaggagcctccttttgtgttttgctttgctttgcttttgtttctgtttgttcattttgagaaaggggtctcggttagtccaggttagcctccctatgtagctgtggatgaccttgaatttctaatcctcctgtctccacctgggtgttggatttcaggtcttcacggacacgcttggccttcctgccccttcttgtcactttcaataagacaggcgttttggccatctgggcctcaaggatgaagcaaccctgtggtactgtggggcggtcagctctgagatctccccagccccgcctgggtgggagattctcatctctaatctgagatagagtttgtgggtctaggtttctgctccaatcttcttaagtcactcgcccatctcgtgaggattagcccggctcatcttcagagccacttagccgctgacctccacgacccagagcagttcaggagggatatggtgcctctgcttggctgggtctctacttaggagaactcacgtccccctggggtgggagtaccatggcttgctgtgcacacagatcctactgtctgctgtgaatctactggtgactagtctgtgtgcttgctgtctgtattagtcagggttctctagagaaacagaacgtacagaatgaatatgtatattcactttacatatgtatgtatgtgtatatatgtacacacacttcacacacacacacacacacacacacacacacacacacacacacacgggatttattagagttgcttacagggtgtggttcagctagtcccacaatggctgccaatggatgaaagtccaagagtccagtagttgcctggtcccacgaggctgggtgtctcagctggtcttcagtataggctgaaggagtaggctgatgccaggaaaggaacaggcttgccagcgaaagtcagagcaagcaggcagagcctaagcttccttcttccatgtcctttctatagggttaggttaaaggtgtgtctcccacctcaaaagaccgagattagcagtgagtcttcccacttcagatatctgagaaaaaagtccctcacaggggtccccagccatttgggtttcacttaattccagatgtagtcaagttgacaaccacaaagagccattgtatctatcatgtgccaagggcctagcccttcctgactgtctacttggtgccaagtgcctgatgtatggtggctgcctactctgtagcgagcacctagtgagtgcttgtcctactgtgcactgaatagaattccaggccctactttgcccctctgtgtcttcccaatggtcctcatggaagccccttttgccattccactttacagagaggaaactgaggcccggggaagaacaaagcttgtgtgtctactttgtgagccccagtgcgaacaccaggtgcagctcagagggtctgaggaagctgctgaaggtttcacagaaagaacagtggagccaggctggggacatgcctgccctcaagcactgtagcagcaggtcccagtgaatactcggctgctttgatgtcacccttgcccctcccttcacctgctggtgagtggacccagggaagggcgccagaagctgtggccttttggtgttttctgagcagtcttgaagggtgtggctcttcactcttgtggaggatcccattcttctttctctctgccttgggggagggaggctgacagccagcgggggtcgggggtgatgacagccatcatggggggggggagctggcagccagcatgtggggggttgacagccatcatgagggggtggggtcaccaaagctcagagaccctacagttcttgtcagctgttttgtcttcctctttgggggggcacttttggggagtacacacaggtgctgatgcagcgtaccctcaggtattttggaggagcgctctcaaggaatactctgagcagttggggagcactctttttgttgtttgtttgttttgttactgttttatttttctttcttttttctttcttttttttctaggtggtcctttatactcccagccctgggcacacacaccactcactgaacaccccagcctgaatagtttattttctcagtagccaccagagggtgtgttcacttggtaagttcccaaggcaatctctcatgagttctgccccaccccatcacagtaggtccatcctgtccctctcaggagacctcggacactcagcgtaactagctgttgctcccaccacagcagctgggagtgaatcagggtgagcatgctttgcccggatcccagaactctagtccgtaagtcctcataaccatgcctcactccagaaccacggtgccacccactgcctccaaggctgcttccatctttgattacctttggctttgattacctggggcagggactccaccagcttcttggcctggacgaggttgatgccctggacatagttcttgatcttcttgatcagcttcactttgtccacaggctttgcctctgtcaggcggacggtgaagtgtgtccgctctttctgtttggggacgtcttcttcctcggccgcctcagaggccggtgctgcagcagagacgagaccaggcaccatgccacccattggcataaggctgacatcctggatcttcaatgttttcttcaggagtccgttgaggtctgagatctccaggagcataaggctggcaatgtcttggaccagctgctgggtcttgggggggtatactttgggaacattatccagaggtgcgccggcgagtgcttcactccttcggtggctgctgcttctcaactgctgcgctgcacagacgctgggcatctgttgcctggcaaggcggagcgctgccccccctagtccaagccgtggcctccacagacagcggctagccgccaccctgtttttatttttcaagacaggatttctcagtgtagccctggctgtcctggaactcactctgtagaccaggctggccttgaactcagaaatctgcctgtctctgcctcccgagtgctgggattaaaggtgtgtgtcaccaccacctggctggggagcactcttttatgtggtttaatgtttgatttatatataatggatttcattataacatttcatccacatgtcccccccccccccttctcccattggtcccatctctagtcttcctaacttgctctcttcctattttcctcaccttgggggatggggaggaaggaaggagggacggggagagaaggagatggagggagggagaggggggagggggagtcatcagagttgttgggggggggcagggatgaaggactacatttctgaaaagatatcttatcttgcctccacaactataaaccagctattgatcctgagaaaggggcggacctacggaggacctcctccctcctccctcctccctcctccctccatgacttggcatttctggtcctaatctttgtcagaggtaactgttgaattctggaggcagtgtagcacatcaccccaccccttcccctgactcttacattctttctaccccagctgactgtgatgttccctgagccttggacgaggtgacatcatgtgtcatttaaacctgagagctgtcgaatggagcagtttccggtctctgcagtttctactgcccactgcaaaaggatgtttctcggacatatatttcatttataagtggtttttagaaggcagttaattagatggatgtgttgtgctcacatcagctggagattccccactgcggactatgactatgggggggggggaggcaggaggcagggagcactctcaggtactagtggggagtactcttgagtctttttgggaagcatactggggaggtacagaggttctactggagggcactaccaagtgccactgaggagaactcttggagattagctatttgagatcactttggggaaacattcttttttttttttttttcagggtgaggatggtcccctgtgtagccctggctgtcctggaacttgctggcctctgtttcccaagtgctgggattaaaaggctaaagatgtgcaccctacagccccagctatggggagcactcttaaggagcactcttcaagaatatacttcagtactagcgggaggctagggaacaccacctcggtccctgccgggctacgggagtttttggcatcaccctcctgcccctgctggatcagaatagtgtgtcactcaagcaggaacgtgctcccagtcctgggcttgtgcacccaagaccacagtgtccagtgtccagcagctcctacccatctccatccttcagtccttcaggttccaggtacagcattactgcctagagccgcaccccacacccacatcaccttgtcaaccgggattctacagatctgcatttgcagccctgaaaaccctcagaagaagagcttataatacccccattctgttgccagggcaacctggtgaccctccccttcagcctggcgcccaggccccgggtgtctgctcttggaacagccttctcttagacacctctgttcacactgagtctcatttgaccactcttcattcccccaaggtgagggacttccaagtggcttttgaatagagcaggaaaaggctttgtgcaaagcgaaagcagtaccaggaagctcgtctgccaaaactgcctggcatagggctggagcactggctcagtggttctgagcactaactgctttcccagaggttccagattcaatatccagctcccaccctggctcatgagtctgtaacttcagtcccacggaatctggctccctcttctggcctctgagggtactgtacgcacacggtgcacagacatacatgtaggtgaaacacccatacacataaaaataaataattcttgccgggcagtagtggcgcacgcctttaatcccagcacttgggaggcagaggcaggcggatttctgagttcgaggccagcctggtctacaaagtgagtttcaggacagctaaggttgcacagagaagccctgtctcaaaaaaaaaaaaaaaaaaaaaaaagtaagtaaataattcttaaatctcccacagagctgggaaaatggttccatgcttaaaggatgagcattcaagcataatgaccagagttcagatccccagagcccacgttgacgctgagcaggaaatcccagcatcagaaggcaggggtctccagagcagactggcttgattgagagatggtacctcaggggatcaggtggaggagagctggagaatgactgccaacatcacatgggttttccccgtgcatctgcacctccaccatacacacactcgtccacacacttgcaaagacccatacatgtgcacaccacacatttatgtatatgaaaaatagaaacagaaaaattcaaaaacaaaaatggtttgtacagaagccgtcccatgcagacagtcacaaactctggaaaggtggaggagctaagagcagtgggtgccaggctgctgagccatttcccagaatccctaagagtggatggggctgtgtaggtgagggagccaactaaatggctcctcccttttctggtttctgtgattccagttgcctggagtcaagctcagtcagaaaatatgagtgggagtctcacaaacaaacaacctgttagtttggggttttttctttttcttcttctttttttttttttttaaagattttatttattatttattttatatgtaagtacactgccgctgtcttcagacacaccaggagagggagtcagatgtcattaaggatggttgtaagccaccatgtggttgctgggatttgaactcaggaccttcccaagagcagtcagtgctcttaaccgctgagccatctctccagccccccttcttcttctttttaaaatatttttattataagttagtacaatgtagcttagctgtcagatgcaccagaagagagtgtcagatctcatatcgggtggttgtaaaccaccatgtggttgctgggatttgaactcagaacttttggaagagcagtcagtgctcttacccactgagccatctcaccagcccactttttctttttcaagacagggtttctctgtgtagccctagctgtcctggaactcgctctgtagaccaggttggccttgaactcagaaatcctcctgcctctgcctcctgaatgctggggttaaagacgtgcatcatcatgcccagccagatttgattattttttatgtgtatgcctgttttgctcacatgtatgtgtagcatgtgtatgcaatgtccaggtaggccagaagagggcgctggatccccaaagagctaaacagcgctgatggtgagccactatgtgggaactgaacccacatcccttgaagaagcatccagtgcctttaattaataagccatctctccagctcccttggttttgtttttggtgtgtgtgtgtgtgtgtgtgtatacatatgtgtgttcacatgagtgtagtttcctgtggaggccagaagagggtgctgaatcccctggacctagggttacagatgggtgggcaagcactttaccaaccgagcatcaaatcaaacctttgagctaggctttctgtattttgcaaacaaatgtatcttgatgcaggggtccggagttgatgcagagattccaggcagcaaacagaacacctcaggagtcaggtgggaccagtgtcaggtagaggtgagttgtatttcacacttttattattatgttaagtgaatttgtgcgctcgtgtgtgtgtgtgtgtgtgtgtgtgtgtgtgtgtgtgtgtgtgtgtgtgtgtgtaggggtatgtctgtccatatgtgggcacatgcctgccacagaatgtgtgtggagagctgggcggtagtggcacataccttcaatctcagcgctgcaggggcagaggcaggtggatctcagtgagttcaaggccagcctggtctacagggtgagtcttaggccagccagggctacaaaaagaaactctgtctccaaaacagaacaaaacaaaacaaagagaatgtgtttaggggtcagaaaaagagttctccttcttccactctgtgggtcctgaggttcaaactcaggttaccatgcttggcagcaatcacctttacctgctaagccatcttactagccccccaggctgcatcttatttatttatccactcattcatttttatgacagggcttcatatttagcctgggctggcccagaaattcagaattcactacgtcgtagaccaggttgcccttgaactcacaagaggtccacctgtttctgcctctgacacgctgaggttaaaagcctgcaccatcccatgctattcaagctctggacctgcagtgccagggtggagtggccaggagaaaggttaggggtcagaaggagcagagggacacacggtgggagccttgagcctcactcctcggatctctaggttcccagcctggtagaatgccatcccagatgtacctggctggccaggacccagccttccctaatggggataggttccccctcccctgaaatggcagagcctctatctgagtgtgtcaccacatgcactgccagcttgctcgctgccaccagagcctcgctggaaagtcgcccgcaaattgaaagagatttctttccagcagacagcgctctggcagattgaggctttatcttgcccatgcagagggagcgagccctgctcatttcggttttcctacaattaaaaacacccaaagctctaaatcacaaactggagaacaggtggggccttcagggttttctccgcagtttgataaagaggcgctggttgccagagcaacggagcgaggcgcgttctggggagaggggccctagacgcctagtgtgttctgttggctctcgggaggaaaacagcttcccccggccttgctccacccagtaggttgttgctcatggtgtttgcggtccaagagaagagcctgagtgtgggaagacggtgaagccccgcttattcttaagagttttctcattttataataaatatatgttcgttcgctaaaaaaaaaaaaatgacagacaaggtatggcggtgttgggaatctcagcgtctggaaagcagagacaggagggtctctgtgagttttaggctagtcagggctacatagtgagtcctcagagagagagagcagagacagagacagacagacagacagatacagagagagagaggtctttctgagcataagcatgtaatgccagcactaaagaagctgaggcaggaagatctgaagttcaaggtcagcctgaaggtcagcctgggctacataacaagatcctgtcacaaagaaacaaaagtggaatagatttacagttctcatggtatggactgacagcaactctcatctgacaagggccagtccaccatccttgcataaacctccagcctctcaggccccaaaccctgcttgccgcctcccccccctctccccccccctctcccccccttctttttctttaaatttatttgcttgtttgtttgtttgtttgtgtctgtgtctgcaactgctggatttattggtgtccaaacccagaactttgtgcatgctagaaaagcactctattgctgagccatgaccccagcccctcactgggggagtctaggcaggggttctaccactgagccacaccccagcccctcactgggggattctaggcaggggctctaccactgagccacgccccagcccctcactgggggactctaggcaggggctccaccactgagtcacacctccagcccctcactgggggattttaggcaggggctctaccactgagtcacacctcagcccctcactgagggattctaggcaggggctctaccactgagtcacacctccagcccctcactgggggattttaggcaaactcaccacagctgagctacatttctatccttaaccttctaaaataattgtgatacaatacgcacactgcttctcatcttcaagtgcatgtggaggaacggagtgtgggtagtcgtcactaccattcatttccaggtctggactcccacagcagctgtgagaaggtcggaggacttgggagcactgtgtctctagttactgtttatgtaagtaaaatccccgccgcccaagcctgagcttggttcctagaactagaactcgtggtggaaagagaaagccctctaacctccacagaggcgcagtgacaagcctgcctccatcccacagaaatgtatcactggtggtggtggcagcacacagaaacaaccggaatttccatgtggtccgctttcagacactttctttgatctttccctttttagctgttatatgtttggttgttcagacacgattttctttaatcttttaaatatattgaaaatagccactccaaacggtctctttttttttccccccttagatgaggctgtacttgaactcacaaagagctgcctgcctctgtctcctaagtattgagattatttatttattttgagacaggctctcaccatgtcaatatataatccgggatattctggaattactctttttttttttttttttttttttttttggttttttgagacagggtttctctgtgtagccctggctgtcctggaactcactctgtaaaccaggctggcctcaaactcagaaatctgcctgcttctgcctcccaagtgctgggattaaaggcatgcaccaccactgaccacctggaattactcttatataggccaggttggcctggaactcacagagatgcatctgcctctgcctcctgaggacttagatcaggtaccaccatgcctggcctgcctgtctgtcttccttccttccttccttccttctttccttccttccttccttccttccttccttccttccttcctccctccctccctccctccctccctccctccctccttccttcctttcttccttttctttcttcatgaagttttaatttagtgtgtgtgtgtgcatgagcgtgtgcacaaatacaggtacacacagagtccaaaagaaggtcccctagaactggagttccaggcaaccgtgagctgcccaggtaggtcctctaaacaacagcaagtgcccttaaccactgagccatctttccagtctttcttttctttcttccttcctttcttgtatttttaaaaaacatttactataactttgtatctgatctctgtgtatgtgtctgctacagagtgtgtggaggtcagaggataacttctctgggaatgaaaatgcacaacttcactgagctaaaaagcagtgcagtggaaacagacaagaatgcagaaagaagaaactgcatctttctggctatagtggcacatgataggtctcaggaggcagaggctggaggatccctgtgagtctgaggccagcctggtttataaatcaaagctccaggacagcaggagttacacagaggaaacctgtcccgaaaaaacaaaacaagccggtggtggtgcacacctttaatcccagcactcagggggcagaggcaggcagatttctgagttccagttcagcctggtctacaaagtgaggacagcctgggctacacagagaaaccctgtctcaaaaaaaaaaaaaaaaagaaagaaagaaagaaagaaagaagaatatgaatatatatatatatggaggaggaggaagaaaaagaaaactgtatccttttttaaaaagatttatttctttatttcatgtatgtgagtacactgttgctgtcttcagacacaccagaagatggcatcagatcccattacagatggttgtgagccaccatgtggttgctgggaattgaactctaggacctctagaagtcggtgctcttaactgctgagccatctcgaatccccttcaaaggcagctggtacagcaaggccagaggccaagctattttcctgtccgtcagcatgaaggcatggagggatgtttgccttcattgaccttactaatctttcagctagttgaacattttttaagatataccccccaaaagtcacatgtgcaaagccctccagcatcccagccctgtacagacagggctttctgcgagaatgtctgggtggttcattcctacttagtgaaatacatggtggcctcttcaaaatacattgactcctgagcctcagctgttaaggagacagcctctatggtcaaatcacttgtttctgttgtacatgaaggcaaaaatttcagaaatgggggctcatcagaacagggctagctgttcatgagtggagggtgaggataccacacagtgaccccatctaccactcaagcattaatgggatctctctctctctctcctctgagataaggtctgtctacataatcctggctgttctggaacttgctatgtagaccaggctagccccaatttcagaaatccaccggcttggcctgcgccaccatgcccagccccttccatttgttttgagatagaatgggtttctcctatttcctgctcagcatacaaaccttttaattctatctctgcttctcatctcggtgttgggctgctgggattatagatgcacacccccaaatctagctttatacctggtactggaggaaggagcacaagtcatggggcttgcaccagaatcagttttacctgctgagccatctccctggccgttctctcatctttctgggctggtattatggctgtgtaccaccgtggctggcttctttattatttatgtatgacttgagtctgtctaggggtctgttagtcagtctgttaactaccatcgattgcccgaggcagctgcaacagaaaacacctggctgtaaatagttttgacaaatgggtctggggagaagtttgtaatgcagggagatcttgagtttattcagagaaaggtgcctttcagggatctagcaagcctgtcctgtcgtgtctggtttggagaatgaggtatcagagcccctgagctgtcaattccttcgagagccaggaatgtgggcttcattgagctggagagaaaggaacagaccagggcgagggggaaatgtcacgaagctccccttgctgctgagatttggctgtccccagcccccctcaataaatatgcagtgtatggccagcctctggatcgttgccagaattcaaaagttgcttttagaaatcttggcagtttttctgtgacatttatggaggtgtgaatttttttaactgatcatttttatttaactggttagggttagggttagggttagcagagactgggtggataggctcttatgtagcccaggttgacctcaaattgttgctgtttggtttttgcttgttttgtttttgtttttgttttttctagacaaggtttctttatgtagccctggctattctggaactcactttgtagaccaggctggcttcaaactcagagaggtccacctgcttccacctcctgagtcctgggattaaaggcgtgcgccactctgccgggtgatggcttggttggcttttggacaggacttcacacgaaatcctgagttgcccttgaacttattccatgtgggttccagggattgaactcaggttgtcagcacaggtggcaagtgtccttactccaagtcatctcaacagtcctgggagatagttctttgttgaaagctctgcggataaaacccagggcccatggtctcctactgagcccacgccagccctgaaatattttctgtctgccatgttctttctttgtacccacttctgcctcagtcatacttggtagctgaatggacctgtgtaatttatttcgctcatcccctgtgattggacatttagaatactttcagactttggcaattacgtgtaatgttgatgaacattatatatcggtcactttgcacctgtgcagtgagctctgagataattccccaaggtggaactgctcctcagatatacatgagttcatgatctcaggagctgcagccccgtgtcctccacatgtcttagcagaaccaactgacattcccacccaggacacaggagctcataatcttgccaatagaaggccttctcttttgtgtctggaggtgtgtgtattcgtgaacccacatgtctgcaagcatgagaggccagaagttgacatctggaatcttcctcaatttctctttttccttttgcctgcctgtatgtctgtgggccgtgtacatgcctggggcccctgagatcagaagagggtatcagatgccctgggactggagttatagatggttgtgagctaccatgtaggtgctggtaatctaacccaagtcctctacaagaacaatcagtgctcctaaccactgagccactgggccaaaagctccagccctgttttgtttttgtttgtttgtttttgtttgtttttttgttttttgagacagggtttctctgtatagccctggctgtcctggaactcactctgtagaccaggctggcctcaaactcagaaatccacctgcctctgcctcccgagtgctgggattaaaggcgtgcgccaccatgtccggctcttccagccctgtttttgtgacaaaatgtcatgatacagccctgagtagtctggagctgactatgttgataaaatgggcctcaaagtcacaaagctccaccagtcttggcctcctgagtgctgggatttaaggtattgactgccctgtctagtgtcccatctgttctgggttggctttgtttgtttgtttgtttttggtttttcaagacagggtttctctgaatagccctaactgtcctggaactcactcggtagaccaggctggccttgaactcagaaatctgcctgcctctgcctcccaagtgctgggattaaaggtgtgcggtgcgcccggctgcagtcagtgctcttacactgagccatctctccagtgctaatctgttttttttgagacaggttctcccactgaaactggagctcaccaacaatgctgaatgaccagcaaaccccagggattcccccttctcagcctccccagtgctgggattatagatgcccagctccacccccatctcccaacacacacacacacacacacacacacacacacacacacacactgcctctccaatccccgctcactgtgcaagtgctggcatcggaactcaacactatagaccaggctggccttgaactcagtgttcctgctacctctgcctctgcctctgcctctgcctctgcctctgcctctatggggactaaatgcatgcgccaccatcacttggtgggtttttatggtcacaaggcaagcaagcactttactgactgagccatctccccatgacctaacatttacattttaccgcttttgtaggtgacaaagtaatccccctgagcatactcttgtaagtaccagtgttcgtaagtactaccttggtttgttggagacacactcttgaggggcaggagaccgctgacgttgggggggggtgtctagggacctgattatttttttttctttttttgtttttttcaagacagggtttctctgtatagtcctggctgtcctggaactcactctgtagaccaggctggcctcgaactcagaaatctgccagcctctgcctcccgagtgctgggattaaaggcatgcgccaccacgcccgcatctgattattttccaatctcagctcttggtacataaatgcttttggtttttctttttaggataggataatgatgaaaagtactcagtacagcaccctacacttagtaagtactcaagaaatataatccattgtccttgttatctgccttgggattactacacttggcactgttaaacctgtgactgtggctcctttagaagcctggaggtgtgtatacatgtggggaccttcttggagtcctcacaaatgcttgctcttcctacctagtcaaacctaagatacttcagggaggtggactgaggtcacatggagatacacatgcacacacacacacatgttcacacatgcacacacgcacaaaacagaggactggaatttacaagactctcagcccaaggctcagctttgtagcttgcatgttaaacttgctgagaaccaccccctaaccccctccatgaatggctgggggcaaggcaaagcattagcacaattaatagcatgtgcaagaatctggttttcacccccagaaccacacacaaacacacaaaaatgaagtcataatatttatctgggggtaagcaggagagattgcttgtggaatacatgtgtcatagaaaccgtgagtatattcaggggagggagccaataaaaaacattttttcttgctgttttgttatgtggggttttatacagcataggctagcctccagttcagcatcccttaactcctgatccccgagctgagcttccacctctcaaggatgacagacattgtgcacctctattgctgcgggtaacacaccctgagcgcaagaaacccaggagaggaaagggttgctatggatcacaaatccaggttgctctaatatctttgggattcaaggcaggaactcaagcgctaatcacaccgcagccacaggagggaataaatccatcttttcttgcttgcttctgctcagctgcttgctttcttttctttccaagatggagtttctctgtagccctggctgtcctagaactcactgtgtagaccaggctggccttagaactcagagctccacctgcctctgcctctcgagtactgggattagtcatgctccaccacgcctggcacttctttcatttttttaatgatctatttttattttatgtggactggtatttcgcctgtgtgtgtgcctatgtgaaggtgtcgggtcccccttgggctggagttacagataattgtgatccgacatgtgggtgctgggaattgaaccagggtcttctggaagagcagccaatgctcttaactactgaaccaactctccagcccaaccttttttttttttttttcccccttttggacaaaggctcggcagcctcatcttccccatggccaccaggaaggcatgtactaataatgtaagccctcccatacatgaggcagtgttccctccacatgtacaccacacagccattcccatagcctggcttaggctaggaagcccaggctgcacatagatatacttcttagtatgggtgcagtcctgcctcccaccccaccagctcttctgcaatgagatcctaagaccccctggatcctagggtagcctgtgtccatttctgctgaacatggtgtatctctataactgactattaagcgtggaggttaacaaccaaatggtgagttccaaagctcaacacaccctgctggttttcttggaatgcttgtgattcagtctggcagccatgttgtgaggaagccccccaaccagtccagagggggccacctatgggtgttttaacggtggctctgctgaggtcaaggttcacaaccagagagcaggattaggagttcaaagccagccttgtctacatattagatttgaagctagcttaagctacatgaaattctgtctcaaaaaaagaatgagggaccctccccacgtgagcccatgaagctggctatacatggatagtcgagtccctgctggaaggaccacacggctgcctggctttctaaatcaagttccatttattagagattttccacatgctacagatttacatagaaacacccattcagaatgtagtttgtcagcaccatagtgacatctgtcactgccagataccaaccacaggcagttctcccagctggacaggagtcagggcggtcagtcatcaaaagggagggaatggtcacttagcacctggtctcaaggcctttctccatgcccccaaacaacacactgaactcagttggtgctcggggaagtcacgtgcagtagatcacagtcagtagtagcgaagaggcttcgagctgacaggggcttttgacaggggcttcgagaggacaggagctcttgtgcacacacatacagacacacctactgaggcatgcccactcctcctgctgtggaaaccctggctcgtacacacatgccttgcacagcaccccatgatcgatcacagagctagtgctccccctgctccctcccaaccccaccccaccccaccccaccctgctccaccccaggttccaagttctgaagcagatcccaggccagcattagcagaggcagcctcagggaccctggcctctctgaacagcagccctatgaagcctgccaggtcgggcaggggttggggtagggtgggaggtacagccaagctccgggtctgatgatgctcactcgctggtgatccttctgagggatgtaggtgctaccactaagcagctaacgtaggagctaggcctagtctagaatctcatgcagcattaacactgagcctgcagacctctatcatatcctacaaccccaaacacagatgagacctgtcacaaaaacccaacaacagggcattggatactactaataacttcaggtaccaatgaatgggtcacattcacaggaagaggtcacagtctgggactcactgctggtggtcatacttcatgccccattcaaaatttcttgtctcctgtttctttataccccattcaacaccaacacacacacacacacacacacacacacacactctctctctctctctctctctctctctctctctctctctctcccactacccccactctgatctttattgacatagtgtcatctcaggaagcccaggctagcttcaaattcattacatagctgaagctggccttgaactcctgaccccctgctcccacctcctgcagtctgggatgagatgcacaatcacacttggcttctcttatttttcccttagaagagttcagcagctcccagtcttcaaaggggtaggtagcagtggacgctggagagagaggcggcatgctggcccctcttggagtgggcgtgagggtggcggtccatcctgcttgaggcctggcctttggcaccaacagccccactgcttaggcccatctttccctcagacccctacggccctagactggcccaaccccatcatcttgctaagtattggcttttaactctgggcctgatacagtagatagtcagagaatctgccctggatgcccaaacgtgaagctaccggtggattcaagtgtctgggcccagcccttcctagtcacagcctgggcctggacctcgtggccctattacagggcctctaggggccactggcaggtcagagcctgtccctgtcatatcaaagcagagccctcttcaatctggccagtaagagtcctccctataaaaatcaggaaaatgggttgaggacccagctctatggatagagaacttgtttctcgaggaccggagctcagagccccagaacccacatgaagccaggcatggtagctacatctgtcatcattgaatgcccatcgagggacggatgggtggagacagcagagtccctggtagttcatgcgtcagctagcctggtgtatacaacagcgaacaaaagactctgtctcaaacaaggtggaggtgagaagagacacccaagattgtcctttgctctctatacatgtgccatggcacacacagacctgcacacacacgcatgcgcgcatgcacagagttttaagaagaaaacaggaaagtcactcagtgagcctggtttgctggtttgcgccgagcaagagggttgggagacatggcatcaaaggcagcacacaaagcacagggtctagccaggcagtggtggcgcacgcctttaatcctagcactcggaaggcagaggcagacggatctctttgagttcaaggccagcctggtctacacagtgagttccaggacagccagggctataccaggaaaacccagtctcaaaaaaacaaaaaccaaaccaaaccaaaccaaaccaaaccaaaccaaaaacccacaaggtctggaaaaggaagcaaaaacagccaggggtgggccaaggcagggattcaggcagccttgggaggtcaggggctttctgtttacaaaggatgaattcccccatgtctgaccctccttaatgtgaaacacaccaccagaagatgcaggcgtagacgcatgcacacaggcatacacatatacatgtatacacgtgcaggtacaagtacacacacgctcgcgcacacacacacacacacacacacacacacacagaggcccaagcgctcaccgtgctctcagcaggcagcatatggtctgccacttaacagcccagtcctgccaatcagggaccattagggtgggttcttttcccagcgtcaaatgctgcaggctataaatttcgattaacaccagtgccaaaatagcacttagcgaaaataagcacgctattgacatctggtggatcctgtccccagtggaggaggagagaaaattctcgcttgaagtcgaaggagacgctgagaatacaaggcctactagttgggggtgcttcctcaggcagtctgcacccccagcctcctgtgcccaggcccctccctgtcagcccagtttctgggcataaaaaatgccagaggctagcactgctggtcctaagaactgcctatccacaggattgacagaatggctctggctttttgaataacatcccaggagaaaagtgatttcctgtctgaacggggctgccatttgtttgggtttttgtagttgtttttttgagacagagtctctatatagccctggctagactagaacttactatgccgaacaggctggcctcgaactcacagagattcacctgcctctgggattaaaaccttcaccactactggccgggtgtggtggcacacacctttaatcccagcactcgagaggcagaggcaggcggatttcagagttcgaggctagcctggtctacaaagtgagttccaggacagccagggctacacagagaaaccctgtctcgaaaaaccacaaaaaaaaaaaaaaaaaaaaaaaaaaaccaacaaacaaaaaaccccttcaccaccacagccagctgaggggggctgcctttaaaggaagtattcgcaaggattcttgggaccagatacctccaagcagcctgctcccatcacaggctgggaccagccacattctcatcttaaggacaagcagcagtgggtcctggagggcctatgggtggtcctcaggtgccagcttaatgttctaaagacatgctcacccttcttctcaactggaagaagtgggttccactatctttgggtcccttgtctacagccatgtgggacttcagtctgccccctggaaccttggcagtcagtccaatggcctgcagtggcaggaagggacagggaaggcttagaactctccgactgggagggtaagagctctgggtgtgggctgggtgtccctgggatcagcctgcagacagaccaatacctctggctaggagttaagatcgctcagccacaggacagggaagagcactgtgggctccggagagaatcgaggattccctcaggcaagaggctggctgaggggagagggcttggcactggagaccccatgtaaacactgaagctagaatgccaagggccagacagaggcacagttcttggggcctgggcctgagggctgtttccctaacactgtccccagagctgggtctccccaggcacagtctagcgctgctcctcaccagcaagggatgctgaccgggagacaggagatgtgagggcaggctgggtctggggcggtcaccagcagtgagtgaggcctggtgggcggcacggcacggactgaggtggtctaggctggaaaccacctggatcaatgtccacacgtgctggagcccgtcctggggaggcccaggtgggagtcagtggatcgatgccaccacacgctcccacacaccacacgctctcagacgtccctccaggggctactggctcagtctcgctggcgtgaagccacagacactggctcctcctctagctttgtctggcctttgtttttcatttgctgagattgaaacagggtcttatgtagcccaggttagcctctacatcagttatgtagctgagggtgactcacacttgtgtcctgacttctggagtgctggcaccacattctggggatggaacctggggtccatgcccacacactaactaaagcagtgctcttggtggattttgtaaggactaaacaggtaggcgctccctgctccaacctacacccaacgctggcttttaccgtattcagctatcttaatggggccagcggttgcagtgttcctggaaggcattcagagcaccacagcaccgactgtaaggagaggtgaccacttgtgagacacaggctcaactcctcaggctcagtttgggggtgaagccaccccacagtccctgcttcaggggactctctggtacaagtatcactgagctgaaaacatcctggagacatcaatgggttaaacttttttttttgtggcggggatggcagccagggcctcgcacacactagctctgccactggcccacaccctaaatggagctcaacaggaaaaggagccacaggctcacagacaacattcgagaatttcacagtgacagcccggcccaccctgactgcacgtgggtgcggtcacatgactgagcttaagtgtagacggccatgaacaaaggagcaggcgagagtccccaagctgaagcaagcgagaggactggggaccgcagcccacaaatcctccccccacccccagcacagccaggccctgaagggcagcctggctcatccacggcccattcgtccatggctcaccagattacttcttgtcactgtactcatgagagtgacagagagaatcccgggggactggggtgagtgtctcaggagaactggaaactttcttcctgtcacggaacaaggccttactgtctgctggctccgggcaccctcgtggagactcagacagaagaggctctggcgacaggagtggtggacgtggtagcaggagtggtgggcgggctggccagggtcctctcaccaccataggttgggcggttcctcagccacacggcttttgaacaaggtgatctcatccaggtgcagcatggggacatctcggatgacatctgtcaggccctcgtggagcagggggaagatgacgacgttcaacgcgggcctctcggcctggaaactgaaccagaggtcagccgttaacggggtgtgagctgaggacacagctgggaaggcacagtgctccgtgagccacgggagacctgggggctcagtgtccagcacggatgcccactctactctaagccatccgattccccgagccagaaagcacaacagcggtccggggcctgaggccggactgcagggttttagcacctagaagcacagagctgctctgagaaagtacctgggttatgatgctcaccgctgtccagtcccaggagctccaactccctcctctgaacctctgcccacacctagtacacacatgatgcacagacatacataaaggcaaaacactcgtgcatataaaataaatctatagaaaaagagaatacagtttctgccaggccgggcatgctcagtaggtagaatggcagcctagcggcctcgaagcctctgttaacaggtgtatttccgtggtcccagcattcaggagatggaggctgggggtcagagggccagttcatcctcagctacacgctgggtttgacattaacctggactacacaaagccctgtctcaaaacaaaaacacaaggtagccttggtgtgtacatatgtgtatgtatgaatctcagcattcaggagatggaggctgggggtcagagggccagttcatcctcagctacacgctgggtttgacattaacctggactacacaaagccctgtctcaaaacaaaaacacaaggtagccttggtgtgtacatatgtgtatgtatgaatctcagcattcagaaggcagaggcgggaggatctctgtgagctcaaggccagcctggtctacataatgagttccaggagagccaggactacagagggagaccctgtctcaaacaaaacaaaacaaaaatgtaaacagaagcagaactcacttggagtgaggtgaggggtggggcaggcagaacgctctgcttggcctgacattcaaagtcatcgcctctctgcccccagagctccagttagcagtcttgggagccccaaagcgggaaacaccttcccccactgcaacagcagacaagacagggttcagatcaaagctgagggaggcacagggtcagccctggagggagacagccccacactatcctttacggtgacagcccccacactactctccacagcactggagggagagccccacgctattctccatgggtggctaccgtctaagcacccacacaacctagccaccctcagacccaagcagcaatgtgacctaactcatctggaaaactcgagactctagggagcggagcggggactaaaatccagcccagtggttaagatgaggacccaagttggttcccagcacccacgtggtggtgcacagccatctgtaactccagttctgggggaattcagaatcccctactggcctctgcaggtactgaacccatatgcacagacacagccacagaagcacgtaaaaattaaagaaacaactgaaggctgtattttttgtttgactaggaaattgtttgttttacttttctctttttcctttcgttttttaaatagtctccttattttcatttcatgtgcattgctaggcatgtctgtatgagggtgctagatccctggaactagagttacagacagttgttagctgctggaatttgaacctgggtcctctggaggagcaaccagtgctcttaaccactgagtcatctctccagcccttgttttgttttttgagacagggtttctctgtgtaattttggctgtcctggaacctgccgtcctgtagaccaggactggccttgaactcacagagatcatcctgcctctatctcccaagcgctgggaataaaggaatgcccccaccaccaccaccaccacaccaccacctggctaattagaggttctgggataaggacagaattcccaggtcagatcacctttagctccacatccagacagacccaccaagtgaacaccagacaacatcttcctttctgaaatggcctgtggccccccccatgctgccaacgctatggtggggcccatccaccttggccatcttctacaggcctcacgcggttcccagctcctggcttctgaatgtgctcaatggagctgggactcagcagccacctagatcagcatccaggtcacagctcttccagctgagccagcagcggcagacccacatggtcggcttgtcaggtgagaacaccccaacagcctggtctagggctcccacacagagtggtaccacacggtgtgactgggcagctcccagactccaaatgccacctacagaagccacgccggctgtggagcaactggggctgcgagcatcagaaaccccatgttttttatgtttgttattttttaactttcttgagacaggctttcacgacactgcacgcttcccaggttggcctcaaacttgttatgaagccaaggatgaccttgaactttggatcctcctgcccccacctctcaagtgctgggattataaacctgaaccactatgcctagtctgtgccatgtggggactggagcctagggctttgtgcacgccaggagagccctctactgaccaagcctcatcccccaacctgattgcactctgaaactgacatccaaggcagacttaagcaatcccctgctccatctgagagcacttctctgcagtctgcagaccagacgcagaaccctgtcttcccggcatggagaatcacatgtgcacactcagctttgagcgcggctgccccgaggctgccaggggccggagcttgccagaacacagcagcagagggggggctgttaactgtggttctggcaagctggaaacttacagaaagaatgccccccatgtctacatggaacaccactggggctggagcagccaggtggccttccagggccatatgcccaacatacggggacagacacaaacatactttaagatcccacatgggaagacagtgccaactggcctcaagagaatgacatggccaccgcagtggacggcagacctctgtcatattagcctgagaggagctggaggacagcgcctcacactgcactcgggattgggattcctgagtcttcaggccggaggctgttgagacatggccacagatgtcaggtctgtaactgctcccggcgagcagtgacctcaccttcactttgctactgtctggggttgtgccagggccatcacgcgtgcttctgggctcaggccctgttgcagggaggagacaggacctagaaaagtcccatatggggttcaagctgtcatgcctaggtcatgtggcagcaggcagacatgaagaggaagccttctgggaagccgaaggcaccaggtgggatgagtggcagtggttcccatgtcacggcttacccagggtgggcaggagtgggtctgtcatggacaggttccagttgtgcctgggagatgaggctgctccccagagacaaggttgggaggagccttggggtctcaaggctctacctccacagtgccacagtatcacggcgccacagtgaccagaggacacagggccctccccattcccagggtttgcaaggcctggcccaagtgggagagcccaaggaagcagggacgaatgagggatccttccctgccgagtctgaagtgggggtgagagagagaagtccagggtgggcttatcagacagccaagtgcatggcccagaccctgacgcaacagcactgtgggcagacagcagcaggcaaggcaaccatgcatcaggtagaccagcacaagtttctagggaagatgggaaactggaccggtgcggtgcagagatgtgtgggcactgggtaaagcggaactctgatagtccctgctcaccagcctgggaggccactaacccccaaggtccaccaggaacctctgtcactgagtctggaccccaggagctgaattcagacctcatatgaggccaaagaagcccaaataggggaaggacttgcagaagaacacagccccacatccagtgggctgcatggtgcaacaggagagaaaaggagctggcatggggacacacgcagctcatcctggtactggggagggttgagatgtcaatgcccagaatggcaccaagaagcaggaaaccccaaggctgagacgtggctcagccagcagactatttgcctgacgcttccgggccccagcatggcataaatctaacgtggcagtgtatgcctgtaacgacaagacctgagaagtagcgagcgggcatcagaaggttacgtttattctgattattcttctccgtgttagtggctagtctgggctacttgagactcaaaagagagagacagacagacaggcagacacaggacacaaaacctgaaggacaaatgtagtcaccacactgtgcaggcattagacacaggcaacctaaatacagatacatcctgtgaggtgggagaagccaaatccaaccccacaacatgaagcccccgagccagttaaggaaggtgagaaagatgcaactcaactgcccagggacctgaggcacgagtacagcctggcacggggacagacacgaagcataatcctgccaggaaccgacagtgcagtgcagggaggaagggaccccagtcttgctggctgagagctccatctaccctgctgggtgaggtgctaggaggattgtggctgaggcaggaggattgccacaaatttaaggccagcctgggctactccaaaagtgctctatacctataacttcagcactcaggagatggaggcgggaggatacggaggggaaggtcgtgtccagcatcacagtgggctcaagggcagcctgagctacaaaaaccctgtctaaaaaaagttcttaagctaagcaaacaaaagaagcttcaggaaagacgacagacagtacggttacttttcacagacaccctgggcaccgggtggctggctgccaagagcaacactgccacctgctggacgcctgcagctcagcgccctgcacagctgggcagactgtaagacccagaaaggctgctgtcaccgtgggggaggggtgtacagcagagccaccaccctgcagatggcaaggcggcagcagaggcctccacagaacagcctctctgccagtctctagggccttgcccagccccgaggctgccagcaatagcagagaggaaggctttgtgctggcctgggtcaggcctcagcgtctgccctgagggtttcttcagaccagccactctctctttacttacactgtcttaagacagggtctcatgtagcccaggctagcctcaaacttgttatgtagtagaggacttgaatcctgcctccatcagcaagtgctaggatcataagcatgtgctaacacatctgtggtactacagagactgagatctgtttatgtatgtatgtatgtatgtatgtatgtatgtgcatgtaatgtgagctcacataagcttatatgcctcacatctacacagttgcccaaagtggccaggagaggctatcttggctgtcttggaacttgacctgtagaccaggctagcctctgcctctggcgtgttggcatgtcccagctgcagtaagatgacttctgagtcatctctccagccccatgttgtaagaactgacccagggcttagtgtcagctgggcaagcactctaccaactacgctaaactcccagccccttacttgcttgttgaaatggccttgcttataggccaagcttgccttgaattcaccaagtattccaaattcccagttctgcctcagcttctgaattgccgggagtccagcctttacaaggatgaaggaaggaagggtcaagaagtctttcttgggcccacatcagacacagtaaactcaaactttggcttctagactccaggataaactctgtacctgaggctagccctaactcctgggctctttctgtctcagccttccatggctgagaccagagactatccatgggaactagtcccctgcagcaggccaggccctctgatcatgctgctagaatctggtgctccatctcctcaaagtcggtaacgggctgaggacactgagtcctggggacagcagtactgtctgagacctcccggtcagctgccaggccttgccactcacctccggaggagcgactgctgcaggctcttgcaggtggtaagggattctccggtgaacatgtgacacatgacgacctgcaggcaacgggccataaaggccagcacggcatctggctgcagggtgccgctgcgagataccaggcacaggcgctgcagagacgagcactggcccagtgcctggaagaactgagcgttggcgttgaagtagggctgctccaacctgcagagagatgggtgtgagctctagggacttgactccagggatgagtgaggctagccactgcctacagacctgccagctcaaggctatcacatcccatcttcagtatgccctccccccaaaccccccccccccccccagttctcatacagccacagccacacctgctggccttaggggacttacatgcaactgccctagggagccgatctgatggcagagatagatcagccacctggacttttattttcaacgctgggaactgaacttagaccacacatacactaggcaagcacttcaccacagaaccgtatgcccagccctttggattttaaatcttagatggggtctcgctccggtgtcctggccagccctgaatttagtttccttctgccatagcttcgcagggtgagaaagtggcaggtaagagggatgcagggtcatgagcagcagagagagagagagagagagagagagagagagagagaggagagagaggagagagagagaaagagagagagaggagagagagagagagaagagagagagagataaccagccagcccatcccaatgctcctaacagcacggggtggaagcccagtgccaggcagcagtagctgccacctccaccactaggtggcagtatggacttgcactaaagcccaggtatcctggggcttagttacacactgtgtcctatacatactttcaaacctttttctaagtagatagccacttacagaactttgccctaaaagatgttatgtgtcacagaggtcaaccagtcaccctccaattgtggggccaatgagcccttaccctctcccccgtgaacaaggctggttagcacccagcactgccggggaactatctaatgtgggtaccatctgacatctgagggtaggcagagaacaaggaaatgggacccacccagattgggccacgttccacctccacgtcttcccagctggctcaaactaccagccagcaaggacatgctgctctgagatgactgcacctctcccctctgatgctgtactctgagccaggggggatgagggagaaggtacccctgagactgtgccaggcctggctcaagtggctcttgcttccacccaggcagcctagggtgactcaggggaatactccgcctccagtgtgggaaaggtggcacccttttctgcctgacacgtgatcctctcgccataggggtgcactccaaacccacatctagaacaacctgtccttgtggcacctccaccccacagggagccaggctggtaccagctcaggttcatggtaggctggggtggaggtggtagtaggtgagcctgggattcccagggctgccaccagaacaccaccaccatccccaggtaaataaaggtgtcctttaagcccccataaacccaggaagcaagcccagagcacacaaagcctcctgagcctatagctagctcctgccacctactgcagcatctctgggcacgcctgcctcagaaggcagcaatccagaggaacggggccatttggctgtgttctggcagcctgtgtgttcagaacaggcagtaccttacacagcagacaggcgcaggctggagcccgggcagagatgccacatgaactgtgatcaagctctggggaagacccacaagacgaattcatctccaggcttgcagggctcctgtgatgcacacatggtcctgcctctgcaaaggatgctggctctcgggacaaaccaatatacagcccaggctggcctggaacccagtcttccagttcaacctcctgagagcagggatcagaggtgttcaccaccatgcctactgcaaaaacacaaggtttgatggacaggcgggaaacaaacatggggggacggtgcagggggagcagaagatctagaaagatcttggctctaaaagattcaaaggctcccctgggttccttgaatctataaaaccaaaggaagtaggcgacagcagtagccagcagaggtcatccgccaaacagcagcattctctgatccatctttcctttctcctctttctttttttgaaacaagacagtctcacacagcccagccgggcccaaactacgtagctaagcattaacttgaatttctgaccctcctccctctgcccatccccccgggctggcttcgcaggtatcctagcacacccagtttatacagatggtactgaggatggaaggcctctactgactgagcttcaggctcagccaggatctctacacatttgcctttcaggcaaacaatgactatgcatgcgctaactgtggcttcaggaaaggccaggggtgtgacaggccaggcacaggaagacaaaggtgtgagagacaccacaaaggaagcaggggaaacggagggagggaggcccgatgactggtgactacacagatgcagccagggaggaaggcattcattcatctgtccgcctgggaactgcggaaggcggttgtgaaagggaggaggggccgctgctgtagtttgcctgctacagctacaaagtttccacaaatgcagaggggaacccaaggcttacatctgtgttgtctttgttgttgctaacaataggatttgtgtagcccaggcaggcttcaaagtcactatgaagccagggataaccctgaactgcctctacccgcagagtgctgggatgtcagacatgcagtctctatctggttgggtttttgtttgttggggtgggagctgttgttgcttttgaagacagggtcttactctagcccagactgaccttgaactcaaggtaaagccccagccttagcctctagaggtgggaactcctccctacagtcacagcacctccatttccttctgcttcctttgtctgtcacacttgggagccacagttactgcatgtgccaccacaatcaactgcctgggacccctaacctggaggaacaggaaagccccacaggcaggttcctaaggcaagtatagcgggaaggcacaggacccaagcacacggatacccaggtatggataccagccctgtctactgagacgacctgggctgtgggtctgctcagctgagcatcagtgggtgcagcagggtgggtgaccagacggggcgtcagacctagacagtctaagcgtggctgtgctccgaggagaaccacaggctagccaggcagctgtggaagtgagcaacccaggaccagcgggcttcctgtcctgctgaaggccaggaaggagacagcgagacgaacaggaactgccctgtccacccccatcctcccttgtgggtcctgaagcccaagggaagctctggcttgggttgacaggtgagatgcttcctgcttctgattagataccagcatccatggatgttgtgggggaaaggtcagcttcaggcccagcccttagcacagcccctgtgttggctagggtcgtctgagaggaggcacctcagttgagaagatgcacctcagttgagaagatgcctccctgggatccggcgtaagcagaggaaacttcagggcttttttttttttttttttagttagtgattggtggtcccatccctgggctggtggtgatcaaggtgtttaatcacagtaacagaaaccctaaataagtcagccatcaaagcagcagtacccacaccagagagagtgacagcagcagacaagaacccttaggctaagggatgacttcgagacctcaccggagcctccacccacccaccaacaccaatggactggcagggtccttaggtcctaccacctcccgcctgcccagaaccggggcatacatatgtccttcacaaacctaggatggcgaagcacgctatcctcccagaacggagacgcagaggcaagacaatcagaagttcagcaccctcagctatgaggccagcccaggacacctgagactgtcccggaagagaaaaggaatgcttacaacctaagtatgatgggccacacctgcgatcccagacgctctgggtagaggggtaggaggatcagatcactgccctcctggatgtcagagttcaaaataagcctgagcaacttgcttagagtaaagagagagccggagacagggctcagtggtagtgctttgcttccctagaacatgcaaggccctcactgtctgtgtggtgcaggcctggaattacagacgaggaaagaaggccatcagttagagaccatcctgggctatcagaacctatctcaaaacccaagaactaggaggtgtggctcagtggtagagcccctgcctagaatcccccagtgaagggctgggagtgtggctcagtggtaaagcccctgcctagaatcccccagggaggggctgggggcatggctcagtggtagagcccctgcctagaatcccccagtgaggggctgagggcgtggctcagtcgtagagcccctgcctagaatcccccagtgaggggttgggggcatggctcagtggtagagcccctgcctagaatcccccagtgaggggttgggggcatggctcagtggtagagcccctgcctagaatctcccagtgaggggctgggagtgtggctcagtggtagagcccctgcctagaatcccccagggaggggctgggggcgtggctcagtagaatagtacccacccagaatcctggcccctgtatgaagcttgaggtgtggctcagtggtagaagaacaaaacctatgttccatttgcagaaccaccacaaaagagaagaatcctcccccgctctgttctttaaaaagttttttgatacagggtcttattatgtggccttggttggattggaactcactattggagtagtgaggctggactcaaactcactgagatgcccctgcctctgcctcccaagtagtcctaaactcttctcctttaaacagtgggtgacgatggcgatcgctgtgctttaccgtgtgctcagtgtgagtgcatccatgctcggctctggaaacaccagtaagcgctgtgctagggttaagtactctgtcaccaagctacatcctcaagccttccttaaagatattatttcaagacagggtgttgtgaggttgcccgaggctgggctcagactcactgtcccaggcatgtcttgaacctgtgatgctcagggccagggcagggcgtcctactttctaggatgggtcctgccacccgcctcaaggccaccattcccagaagtccgagtttctttctgaactatctgtttgcacagcctgcctgcatttggccccacagggcaccagcagcggctcccagctgaaacccctgctctcctctgcctgccccatctcccgctcccctcctgctcctgcagtgccctggctgctctgaatcaaggaggtttgggcactgacatctgctctgtgcttctggctttgttgaggaaggttcttgctaatacaacccaagctgctctggacctcaggacacacacatcagacatccggcataccctagtcctgacggccccagccaaccgctacacaccctccaagagtcactgtgaggggctcagtgggttagagcgctttcgagcaaatattaaaaaccaagttcaaatccccagcagccacgtaagatccaggcaggccacacatgtctctaacccccaggtcactggccagccaaaatgaccagctttggattcagtgggacgtcttgtccgaggaaataaggtgtggaagagcgaggtggctcagagttaggtaagagcacgtgctgagggggtctaatggctatagtcaccctcagatcccctgtaaaggtgggaggacaaaaccaaccccacagatttgcactggcctccacatgtacgccgtggcaatgcacccccacatggtaatcataattaacatttacggctaggtacagtggagtccacctttaatcccagcacccaggaggcagaaacacggggagcctgtgactccaaaggcagcctggtatatatactaagttccaggccagccagagtgacagagtgagaccttgtctcaaaaaccagggtggggagctgagggaaatgagacgcagacctggagagccggctcagtggttagagcgctgactcttcttccaatggacccaggtttggttcccagcacccacatggtggctcacaaccttctataactccagttccaggggatccatcattctcttctggcctccacaggcactgcacctacgtggtgccacagacatgcatacagccaaaatacacacatataaaaataaaagtaaataaatctttttaaaaaaagttgaagaccgtaaggttgtagatgaataaatgcagcaggggctcctgtaagtgtgagacgagagaaacccgtgctcaggacccctgcctcccacggctctgctaatcgccatgaccccagcttcctgaagccactccctgcagacactaaggctccttttcctctgatctctaggacaagcccgtgttagcgccaagctccaccttgacaggcagataccatctgcaaatcccagaagccctagagaagtctgagatcttctgcccctcatctcaggtcttcgcctcagtccctcagctcttcatctcaggtcctcgtgcctgagcccctcaccttagccctttagacctttacctcacccctcaagccctcagcccctcacctgaggtccttcagccgcttgcagtgcttcagcatgtcagcaagagcaggcatgtacaccaccttccccatcatgcccaggttggccagcgatagagactgcaggtgctggcactggagaccgatgctcacgagtccggagcccgtgagcatgcctggcagttgggctagagtcaggtgccgcaggaaggtcagctggccaatggcggccacctctgagtcccccacgttctgtgcccgactgcagggtgggagggagttgcggatggcaggctcattgcggggcatggctgaggagaaattggacccgatcagttccaggtgctccagaaatgggagcttcttcagcagagaccagaacacagaggcaggctgtggggccgactggcccacgaaggggttgggacaggtctgcaccccaatgcgcaccttcttgccaaatccacggggtactgcgtgcatggctggcggggcgggcgcacggtcaggcctgggtgccgagtcagccacagagcagacaggcagggacagggaacgcaggtggcagagccgagccaggagctggcagaggtggcggcccaggccgtcggagctgtggtgatgggcggcagagagattgaggtggtgcaggttgcagcaggactccaccagagtctccaggatgctgctgtcaatgtcgtcctcggccttgcgcagcaacgagtccgcagacaggcaatgcacacagccgctgaggttgaggctggccaggctacgcaggtccttcccgccattgatgagccgctgaatcaggtgaccccctgacagcgtacaccggctgaagctgaagtagaagggattgttgaatttcatatgctggaggagggtggagccattgagccaggacttgggcagctgcagtgcatccagggccacgttgcgggccatggagtccagcaagtttttggtggccccgctctctgcaaagctgccagggacggagatgaggaaggcatgcaggttctcaggcgtgcggtcgctgagcacggccaggtagagtctcaccacctcctggttgatgtagccaggagccaggcgtgcatagaagacacgcaggttctggtagtggggcacgttgctctggcccaccatgagctggcccgagaggacggccccctcccgggtgcggtccaggatctcgaagtagagcagcagcttctgcaggctggcacagcagggcaccaccccgtaggacggcgtgaagagtgtctgcttgagctcctgcacgcggcttagcgtggccttgcactcactgctcagctggctggcgtcgaagccggggctcacgtcaatggccaatgagcgcaggtgctgcagggccgagagcaccttggacagccgcagcgaggtgaggtggcaacctgacaagttcaccttcaccaggctgtgacaccgggccacgtgctcgatggtggagccagacaaccaatagcagcctgccatgttcagctgttggatctcccggccaatctccttcaccagttgcttcaccttctcctcactggcctgcaggatggagacagggcaggagagacagggatcccgggctgcttcccacttccgctcagaggagagtggcccatgcttcctcttccagacacctgcccctggcagcagtcgagagagtcctgctcccaggaagacgttggctagccaggccctggtggcccgggctagcacgccaccacttgagaggctgagataggagcattacaagtttagcatccatctgggctgcagagctccagcatggcctggaatactcaccaagactcttgcttcaaaaggaaaaacaagccgggtggtggtgatgcatacctttcatcccagcacttgggaggaagaggcgggtagtttgaggccaggctggtctacagagtgaattgcagaatagccaagctacacagagaaagcccatctcaaataaataaataaataaataaataaataaataaatattcacatcaggggcttcacaactgcatgtaactccagctccaagggaatttgatacctctgacctctgggcacaagaactcacacaggggcacacacacacacatctaaaaataactagctttaaaaaaaaaaaaaaagacttatttatttatttatttattatatccaagtacactgtagctatcttcagacactccagaagagggcgtcagatctcattacagatggtgctgcgatttgatctcaggaccttcggaagagcagtcagtgctcttaaccactgagccaactctccagcccaataactagctttttaaagctataattttcatttgtttttgagacagggtctctctgtgtagccctagctgtcctggaactcactctgtagaccaggctggcctcgaactcactgagatctgattgcctctgcctccttagtgctgggactaaaagcatgtactaccattgcacggcatgctgttgtatttttttttaaagtcaggatctcactgtgtagccttgcctgtcctggaactctacagaccagtctgagcttgaatttatagatcctctgactcctaagtgctggaattttaggcacatgccaccatcgggcacacaggcacacctatctgtttgtttggggctaacctggtctgagccacgagccccctgcctcagcctcctgagtgctgggactaccatggcaggcttatgtctcagttgatcagagacttcagcccggagcaatggcaggcagcccttctgcagcaatgtctactgtggcatctgtctgctgtgccactcaacaacaaccttccgcagtctgccctgtggtgcagcaactccattctgcagtgcctacatggaaggcctcccactgacccctgcgtttgaggcccaggctccctcccttccagaactccacccacatgcactatatccagcccccacccatcccactccatcatggggcaagccgcctaccctcttctaccctggctctgtcattcagtgtaacctgaagatcattcccagccagtcttgtgtgcaaacatcagtgcctgccactggccccacaggctggcacctggttgatctcgctcaccctcccgtccaccgtgcctcacctggtagtccttctgcagcagcacggtgtgcaccaggctcttgtccaggcacagggctgccagtttcctgcaggtgcgccgcacactgagaaccaggtccgtgctggggacatggctcaggatgtgtaggaggatctcatcggagaagccaagcaggtgggtgtcacctgctgcctctgccgctgcctcctcctcactggacatgtcctggaagtgagggacatcagagggagcagtggatcagcctttagatgctggacaagcagaaggacccgagtttggatccctagcacccacataaaaagctgtgtaagggagcctgcacctggaatcccagcactggggatgcgggcaggaagatcctaccccctcagtagagaagtttaccagctctttgctgaactgcagagaacacagagttcccgagaatgccctcttagagctgcaaaccaggagacaaggtgagaaggatcaactgaaggccgttttcaagcaaggcccgaggattctggcttctcctgggtgttaaacagagcttgcctaggctgtacctaaacttgctatgtggcccggccctagcttgagcatggttctggggacagacacatgtgccaccatgcctgccttcccacaatcactctactcccttatctatccatccatccacccatccacccatcctttcttctttcctctcttccccttccttccttccttccttccttccttccttccttcctgacagtgtttcatatagctgaaactgaccacaaactagccaaagaggaccctggcctcctgatcctcctgtctccacctcccaaatgctaggatcacagtaatgttctaccagatccagcacacagcacacacagcatacagcttgtacagcctacagtgcacacggcctatacagtgcacacggcatacagcacgcacatacagcatacaaggcacacagcaacatacagcatgcacaggcccgggaacctcggcctgcacctctgcccgtctgtttcccagacatttacccaaataacaacaacaatttatacaagacactgagcaattccacaggttcaggtttggaatatcctgaattttctctcttttatttatttatttacatctgtgtgtgtttctgaggagagagagagtgtgtgtctgtgtgtgagagagagttggcacacatgtgcctgtggaagtcagaggacatcttgtgaaactgtggaagtctggtttctaagccactgtgtagggtctggcatagggctaaggtggtcatggctggagaggtggctcaaggttacaagcgcccactgcccttgccgagaaccagagttcagttcccagcacccttgctgggtggctcctgtctgcctgggacttcagctctagggaatctgatggtctcttctggtttctgtaggcagctaacatgcacataccccaaaacagacagacagacagacacacacacacacacacacacacacacacacacacgttgctgtgtgcactaccagcactcaaaaggaagaggcaagcaaatctctgtgagtttgaggtcagtttagtttacagagtgaattctttttttttttttttttttaaagatttatttatttattttatgtaagtacactgtagctgtcttccgacactccagaagagagagtcagatctcattacaggtggttgtgagccaccatgtggttgctgggatttgaactccagaccttcggaagagcagtcgggtgctcttacccactgagccatctcaccagcccctacagagtgaattctaacacagccagagctatatacacactaaaatcctgtcttgaaaattaattaatttttaaacatttaaaaatctaaaaataaaaatgaaaaaaaagccaggttttcaggcttggtgtcaagctccttggcctctgtgggtttgttgttgctgttgttgttttgtttctgatagacaagggtctcctgtagccacatgcactatgtccaccccccacccaccaccccacccccatcatggggcaagccgcctaccctcttctaccctggctctgtcattcagtgtaacctgaagatcattcgcagccagtcttgtgtgcaaacatcagtgctccctctgttgtccctcacttccaggacatgtccagagaggaggaggcagtggcagaggcagcaggtgacacccacctgcttggcttctctgatgagatcctcctacatatcctgagccatgtccccaaagaccagctcaatgactgatcctcctgccccccttcccaagggttggctggctgcttttgtatctgcagtactggggatggaggtggggctcctgaatctcagacggagactcagatgggctctcacctgaagctacttcccagctccctacaaacggcagcaactgcaggaactgaggacccctcctccactcagctcagcacactctcagatgtccagatcaaaagacgccagcctgctctacatgctgagttccaggctaccaaggctacccaacaagtccttgttcagagagaagaaagaaaagctggctaggctcacaggtgtgccctattactcctatcttacagcaggtgtgccctattactcctatcttacaggagggtttccttgtttgcatcctgtgtgtaagtgtgttatgtatatggtcacacatatgtggagttgtgtgtgtgtgtaagcctggctggacagggagtgtcttcctaagtctctgtcctatttgtctgaggctcatctagacaaagcagtcatggagccccaggaccctctgcctctgccccactagcatgggatccgacgcacagacacgatgcaacaccctgctttgcttttgatgtggctgctggagatacagaacaggcactttactgactgagccgtctccccagatcaaggctttttttttttcttaactgcctgagaaaaaaagcacagaaccaggccgacctgagtccaattcacagccaccctgtgccatacccactctccctgtagacagcaggctcctgccaggatttacttatggcagctcaactggaatacaattggcttagaactatgacacgccaaagctggctagcaaatttgaaaaaccaagcctagcggtgcgctcctgtaatcacacaggcatatgcacaaatgcacacatgcagagtcaccaggttgactcaggcactgctgctgggacgcactgattctagtcttttatgtggatcctcctccacccgagcccaaagcactgctttcacccccaaccccagccgttctcttcttcactggaccctaggctgtcacactgagaattaccctgtgaatcctacacttgggaggatgaggcaggactacagagtaaaggccggcttggtcagcagtcctccccacaaatccaagcggaaaatgagaagtcctacccttatgatttcccctcctccctcctgagtcctccatccaccgccaggcagttcgcagtccgggctttggcagcgggtttgtcagcatgactttgaacccacagtctctcttcctggagagatgccttactcgtacggagcttgccatacaagcactaacacctgagtttggatctccagcacccttgttaaaagcctagagtggcagcttgcagctgcagtcctagcaatggggaggtggacacagaaggatccctgaagatgcccagacagtcagcctaaatcagtgaggttcaatgagaccctgtctcaaaatacaagacggaagggctggagagaggatggctcagctgtcaactgagctcttacagaggagccaggttcagttctcagcacccacacgatggttcacaaccagcattaactacagttaaagtcccaggggctcaactctcttctggcctgttggcactttgtacacacggcacacgtacatacacacaagcaagcactcaaacacacattcacattaaaaaaaaaaaaaaacaaaaaacaacaacaaagccgggcgtggtggcgcacgcctttaatcctagcacttgggaggcagaggcaggcggatctctgagttcgaggccagcctggtctatagagtgagttccaggacagtcaaggctacacagagaaaccctgtctcgaaaaaccaaaaaaaaaaccaaaaacaaaaacaaaaacaaaaaaaaaacacacttgctgggtgtggtggcacaaacctttaatcccagcacttgtggggacagaggcagaaggatctctgtgagttaaaggccagcctgatctacataatgagattctgtctcaaaaataattaattaaaaaatgctttctagggctggagagatggctcagtggttaagagcactgactgctcttccaaaggtcctgagttcaattttccagcaaccacatggtggctcacaaccatctgtaatgggatccaatgccttcttctggtgtgtctgaagacagctacagtgtactcacaaaataaataaataaatacatcttttattttaaaaaatgctttctaaagtaaagagtgcttgtggacatccaacattgatttggggcctccacaagcactcccacattcgagagcacgcacaggagccaagcacagcaatgtgggtctacagtcctggctacttaggaggctgagacgggaagacaccttgaacctgtgaagttgacagcagcctaggcaccatagcaaaatctaatctcagaggctcaaaccttactggctggctatgttgctcactcagggaacagaggagcttttgagtcaggactccataggatcacacgagcagacatgtctatttaatccctaggacgtagaagtcattgagagctactaatacagcaatactatcctggaactcctcttgctagagacataactttctaccacctcactcctctctcattagtctagagctggaccacacactctctttcctgtcaatcaaagagacacttctgagtccagttttcttcaaagaaagagaagcttccaacagaccccagacatagtcctcataccctggaaaacacttgtaagtctcactggataaatgcaaggaaactcctaggacttaaaagtgtgcccagagatcagcaagacggctaagtgagcaagagagcttgccttgcaaacccgatgacccaagttcaaaccctgggacccacataaaatgctggatgcagtgacccacatctgccatcccaacactgctagcgcaaagtgagaggaggagataggggcatctgtcaaaagctcacaagccagctactctggagtatacaccatcaagagagatcctgtctcaactggggggaaaggcagaagcgataatttagtactactctttcggaggacctgagttcgattcccagtacccacactggggaggcgaataaccacctgtgtaactccaacaccgggtgcacatgatcctctggtctcctcagacacctgtactcatgtacacatacccacacacagttatacatacacacatacacacacacacacacactaatataaaccagataaaaggcaacaaccaactcttcaaagtggtcctctgacttccacatgtacgccacgacacgcacccatgacatgcacatgccagtactcacgcatacacacacgctaatatgataaataggtgtacccccagatgcgagtacctaggaaagaacaaatataactcaagatagggaggaaggcaacagggaagctaccaggtgctcccctaacccccgccacggccccatactgtcgtctgcagaaaaaaatactgcacacccgtaacaagacgcagtgggattctccagctgacctagatcataaagctctggggtcagtccgacgccctatcacactcccgcgcatcacaagtagactccagaaagaagtgggctgcacttaagctgatagaaaaaaagaagaagccagggctgggaatggggtcgaagccctgagttccacccttagctgcacattaaccaccgcgtgatgatgcacacctgtaaccccagatttacaaaggctacaatagaaagattgctgtacgttcaaaaccagcctgggctgcacactgaactccaggctagactgggctacagtgtaaaacaaacaagaaaacacaagcagaagggacaacgtcccatagctgcgagggcagagccaacacacaaggagacgggggaaaggcctggaaactcagcaggccacgtgaaagggtccattctggccatcgagattgtgcgcctgggaacagatggggtcaggagaggagagggcctggtaggagggtaggagacggcaaggatgggccttggaataaagccagggtcgggagggaagcccagaggggactccagccgccggggctggaggtgcaggtcgtacctctccggagctagccgccggagctgcagcctcacagtcccccagcctgccagcgtagggatgctcgaagccggcgcggccacagctccacagagaccccggtaaggggcgtggctgcggcgcacgcctagacgtacttccgcttgcgcccggatggacccggtgcggtcgccatgttgggtgtggcataaagtactctcaggattcagaggcgtccagaaggtcacgagtgaccagtctcttaagctacctccgcagtttcttgctgtcgctccaacaacatgcgttctgctccaggcctttgcatttgccattcgcgctacacactgcgctccaagtcatctgtcacagcgctcaggtatcctagataaccatagcaaccttcatgtgcacacgctcctgaatttgcccctcatcttgcgttacaactctcaatagctctttgcaccgcctgacttgctaagcctttttgcttgttttgagtctcactctgtagtcctggctgtcctggaattagctataaagaccaagctggccttgaagtcacaaaatccgcctacctctgcctcccatctatgcctaggccactgtttatttaatgtatgtgagtgcactggagctgtcttcagacaaagtttctgggaattgaactcaggacctctggaagagcagtcagtgctcttaaccgctgagccatctctccagccccatcttgttttgttgttgttgttgttggtttttggttttgttttgtttttttgtttgtttgtttgtttgttttgggtttatcgagacagggtttctctgtatagccctggctgtcctggagctcactttgtagaccaggctggcctcgaactcagaaatccgcctgcctctgcctcccgagtgctgggattaaaggcgtgcgccaccacgcccggctgttttgttttttaacactactgaggattgaacctaaggcttcctttcatgcgtgctaagtaagcaccctgcctgtacccccataactaagcagagagtctgcctggtactgttctttgcatgtcaacactgaacaaataaatatttgctgaataaatgaataataaatgtttccacggcgtttccagttaaaaatggtttcctagagctcgtgaaatgactcgtcagggaaaggagcttgactctgactgaccacctgaagtgagtttgattccaaggacccacacgctggaaggagaagactgccttctagaagctgccctctggtgtctgtgtctgcactggtcatgcacatgtgctctcgctcgagtgtacacagagaaagagtcaggaaggaagtccagatggtttaaaattaagataatagtttaatgggagctggggatgtagttcatttgagtatttgtctagcagatacataacccggggttccgtccctggcactatataaaccaaaccaaacggaaacaatcttaggactcagaaagtggaggcaggaagacctgcaggtcaaggttaccctaggctatatagtgagtttgaagccagcctggtctacatagtgcgtttcaggactgccaaggctatagaggaactaatacacccttcttcccttgggacacataactaaaataataattataaaaattaatcaaattatgaacacagcaggaaagctgagtttgaagcccctggttaaaccctccagtttagcattgtcatctactacagagaagagaaaatttacgagcaacaggaagccacagaaaggggtgggcacaggggtgagttggagccactgatggagcccgatcgctcgacatcagctgattctcactgtgccagataaagatggccacaaatgtacaccccagcccatctcccaccactaccatcaacactcaacaacttcttcccttttcatttttaattatatttcttattttacattgtgtggggagacagagagagagagaggtgtataggtgcatgtagcaggaagcacatgcagacgttgaaggacagacccggggagtcagtttcctcctttggcagtggtttcttttaaaaaaaaaaaattatttatttaatgtatatgagtacactgtcgctgtcttcagacacaccagatggttgtgagccaccatgtgggaattgctgggaattgaactcaggacctctggaagggcagtcagtgctcttaaccgttgagccatctctccagccccatcagcagtggtttctttttttttttttttttaaagatttatttatttattatatgtaagtacactgtagctgtcctcatatactccatcagatttcgttacggatggttgtgagccaccatgtggttgctgggatttgaactcaggaccttcagaagagcagtcggcgctcttaaccactgagccatctcgccagccccagcagtggtttctattggctgtcgtcaggtcacttgtgcggcagatgctcttcctcagtgagccgctttgcaagccctttccaggtttctttgcactacggtatcataaagcttagactggtccgaaggttactatttatttcaggctggcctccaactgcagctcctcctgcctttccaagttcccaggtgccagagtcacagatgtgtgccatcaaacttggaggcacattatgcaacaaaggaggccaatcagaaaaggctcccagcgtgggactggattccagctcaaggacattccaagaaaagccaagactgtgacacactacaaagatatcactggcctgggtggagaccagtgatacaaggcttgtcttgaagtatctttcaaactgaaaaaaagaagaagagagttgggctgccaaggtggctcagaacccacataaaactagaaagagaaaataaagttgtcctctggtcttcacgtgcaaacagtggtttgtcttgaagtgactaaggtaacgccatcttgtctgcctctattttgtatctgcttagacacttctcagctccatactccccaacagcctcattggccttggctacatacatatttggcatctccatgaccttgaacatggtccagatgcattagcccaaataattaatatttatacaaacgaaacataaaaaaccaaaagtcagaaactaaatacactacttaatataaaagatctgctaagttaatttagattttaataaaagtgcactataaaagaacacataggcttgttcttaaccactgagccatctctccagcccagcgtgaagcacgggtccaagcaaagcaaacgtggcattgggcttgccctctcccttgctaaactactagattcttaaagcaccaaggtctagtgccttatttggctacttacttatgcctgcctaaaactccaaggtccaactatcaaaacaccaaggtccagcaatcaaaattcattctttggttacagtgactagaatatctaatcaggacttcccacctcaccccagccaagaccttttctccttaaaaagtcacttttctttgtccagtccagatttactaccccaccgtgccttcagggtagtgaatctttgtgctgagaatctggtgtctgagtgagttctctgccaagtctcagtagattattttaaattcaaggccagcctggtctacatagtttcaagctagccaaagctacaaagtaagaccctgtctcaaaaacacttttttaaaaatcacttccaggagccctatgtggtagctcacacctttaatcccagcacttgggaggcagaggcaggcagatttctgagttcaaagccagcctggtctacaaagtgagttccaggacagcaagggctacacagagaaaccctgtctcgagaaaaaaaaaatcacgtccaggatgaagagattgctcagtagttgagagagtgtgtgctgaagttccagagaacctgagtttggtaccaggcaagacatcctcagacccctgcacatgcctgtgtctaaacacacacagacaaacattcacacgggtatggatgtcttgcctgcatgtgtatctgtgtatcacatgcatgtagtgcctacagagctcagaagatggtgtcagatcccctgggactggagtactggacagctgtgatcgaccatgtgggactcaaacctgagccgccttctgcaaaagcagccagtgctctttaactgctgaatcatggcttccagccccaagcccagactcttcactccggtgactagtcactgtcggtccctacagtggtcagtttcagtcaccagaggtgtgcaaacctacaaggggtaccccacccagggggaaccccattgtaccctgcagcctctgcactggagacaagaaaggtgtgaatgtaggctcactgtaacaaatggagcagcctgcttccctgtgctggcagtggaggcggccgtgggtgggtgaggcaggcttcacggggactctcagtgctttcccttggatctcaccgtgtgcctaaaaactgcttgagggaatatttttttccctccatgctgggtacagaatcaggagaactcctatatgctagggaagtgctttgccactgagccacatacacagttaatccgctttaaaacaaaatctggaggagctcaggtcctggggttcagaaggtgactggcctgagtattcaacctcaggaccccacataatggaaggagaactgacccccacaaattgtcctcttacacacacacacacacacacctacacacctgcttactttcatatgtaagcccacacacataaaataaatgaaaaatttttagacatggggctttttcccccagtgtgattgtgcatgcttctaataccattgctcaggaggcaggcagatctctctctgagttcgaggccagcctaagtccatggggtgagttccaggacagtcagggctacacagagaaacccggtcttgaaaagccaaaaagagagagagagagtaggttactctggtgtccttactttctaccttgtttgagacagcctctcttgtctgctgctgtgtgagccctgacagctggcctgaacttcaagggattctcctgcctctacctcatccaatgtgggagtgctgggattacagatgttcactgtgaccagctcgacatttctgggtaccaaattcagtctctcatggttgtgcactgaacactttacccactaagctgtttccccagccccccagatgccttctgttgcatgcttgcaatgtagcctgtgtgactaaaaaatcaaattcttcattctactaaaattaatttttttctttcttttttttttttttttttttttttttggttttacgagacagggtttctctgtatagccctggctgtcctggaactcactttgtgtaccaggctggcctcaaactcagaaatccacctgcctctgcctcccgagtgctgggattaaaggagtgcgccaccacacccagcacaccggcacattttgttggataataagtgacagtaaggatctagtccgtggtgtgggctgtaaacagttcggttcctgccctctctgttgggcgactcccagctggtcaaatgcagtatgcactgggagggccacctttccactcgggccccaccatttgaccttcttgtgttgctaaagcgatggatactctcccagcctgctctccccagcctggcttgtgttgggttcttgccacgatcactgtgaggctgagcagatgcctctgtcgtctttacggggttccatgaaggaagatctggaatcccacctgcattggcacaagttttgggtggcctgtaggaggagtgtgggattcaagtattcaaaggtgagtattagggtcagaactgcctcatgggggatccagtgacctgaaaagaccagagccaactggggtagaatctgcaaaggcgaaactgccctcctgcagatggaggagggaacacagaacagaagctgctaattatagaacaaaatttcacatttctggaaagcaaagaatcaagagtgggggaaacgcttgcttattagaccactcaccgagactttgtttgtttttgttttgagacaatgtcctcaatgtccaggctggcctctaattcactatgtagccaaggatgacctaggcaagatctctgtcaactgaactgtagctactgttattgctatagtactggaggtttgggggaagcattcaagagctggaggcaggaggatggggaaagggttgaaggtagacttctctgggatgtgtgaggtgtgaggacctggtactaacacaacctcatgtcaaaaaaaaaaaaaaaaaaaaaaaaaaagctatgcacagtgacaggctttgttggagcctggccttgaatagccagtttgcctgctggacccaggaggaaaggggcggagccagaggctgcactggatactgtgaaggctacgcttgggatcctttaatggcaaagatggaaggcgcatcagctactggtgtgtccatttctcaaatggcaacttggcaaccaacctgtgccctgttctgtcctacggggaggtagtgttttgtctcccagctttgtccccagtcaaccctagatttccaccaacacttgcactgtctggcctggtcgccctcctcgtcgctctgctctggtgtctgtgttacctgggcctctgttaccttttcttctgtctcttttgcagcaaggtctcactatgcagttctggctgtcttggaacttactacatagagcagggtgatcttgaactcacacatccacctgcctcaagtactgggactagaggtgtgcactatagtgcccagcctgatggggaaaaaaagaaaaagaagtcaaatttcttgggtttttgttatcactcgaggtagcttatttagggttggcttaaggacttttgtttaaggcggtgtctcatctatcccaggctggcctcaaactcagtacgtagatagggatggccttgtaactcctcctcctgcattctcctctgaaataccagatttatggactcattaacccagggactcattttgtagtccaagctaacctcagccttgctcagcctcagatgacaggtatccacatctggcccttgaacttcggtatctacactgagaccacatcccatagaattaagatccagtgctctttagcaaggcctctgctctccctggatttggtcatgaaccttagccccaaacctgtttgtgtatgcatttgccttcacttaaggactcataatgctcaatgtacagtgatactggacacttcctgaaggcaggtgaacatctggtttggtttctgtgttgcccatgtgattgtttgggtgggtgaagggctagatgtatggattgaaggatggactgataggtgtgtatagctgagtggagtgatagctgatagctggatggagatgactaggactcaaccaaccagtgttctctgcatgtgtgaacaaatgatcccagtcaaagctaacttgcggcacccaagtccaaggatcacgactgacaaaggctggagctgcgtgccatgtggaaggggctgatttccaggatgacccccttcctccctctgaggtgttcctcagtcctaggctctcaaaacaaaaccagggaaaagatgcccatccctgggaaggaagccataggcttcacaccttcctgctgtcagtcacagctctggaaagggcagcttcagactagcagaggggcttgaaacccagttatgcagatggaggcaaagggtgtggacacccctcggttgaggaaggtagtgttagtgcaggccaacttggcctaggtttctggaggagtaccttttcaactcttcaagacagtctgaaggtgtggttatttgtgagacttcattaaagggcctgtagccctcccactagataccatcagcaaggcctagcccaccctagatgccccccccaatagagctccacacccacccaacctgctccccacacccagcaaagccacagagccacaagctgtttgtgtaaggtaaggtgtgcacttttattggtctcaagtcagtgtacaggccagccctggctgcctcaacacctcaaccccctcccagggagaccaaagccttcatacatcaagttggggggacaaaaaaaagggaggcctcagacctgggccattcagaaattaaaaacaaaaatgaagtattaaggcggaagatttaaaaaaatttttgcagtacataatttacacagaagcaatgctgtcaccttccccggggtggactcagggcatggacgcgaccatcctcctcttaggagtgggggtggcttttgggagggtgagggacttcctgtaaccacttatttcatggatacttggaatgactattaaaaaaagacaaaaccaaaaaaaaaaaaaaacaaaacaatgtacaaagtcctcagccacatttgtagaactttgggggatgtttgctccaaccaactgctgtcgccttcaccgttccagtttttaaatcctgagtcaaaagcgccaaaacaaaacaaaaaaacttaaaaaaaaaaaaaaaaaaaaaaaaaaaaactttaaaaaaaatttaaaaaaacaaagccatgccaatgttgtctcttattttttttttttctgcgcaagttaggttttgtcaaagaaagggtgtaaaacgcagctcagtaacagtccgcctagaagcacttgcggtgcacgatggaggggccggactcatcgtactcctgcttgctgatccacatctgctggaaggtggacagtgaggccaggatggagccaccgatccacacagagtacttgcgctcaggaggagcaatgatctgaagaaagcaagacaagatggtgaatggtgagctctctgggtgctgggattccccttaaacctagaaggttgctctgacaaccacagggcccaccctcaccaagctaaggatgcttagcttaccttgatcttcatggtgctaggagccagagcagtaatctccttctgcatcctgtcagcaatgcctgggtacatggtggtaccaccagacagcactgtgttggcatagaggtctttacggatgtcaacgtcacacttcatgatggaattgaatgtagtttcatggatgccacaggattccatacctaagagaagagtgacagaaatcagacttaacttgtactatggcctcaggagttttgtcacctttagatggagaaaggactaggctacaacttacccaagaaggaaggctggaaaagagcctcagggcatcggaaccgctcgttgccaatagtgatgacctggccgtcaggcagctcatagctcttctccagggaggaagaggatgcggcagtggccatctcctgctcgaagtctagagcaacatagcacagcttctctttgatgtcacgcacgatttccctctcagctgtggtggtgaagctgtagccacgctcggtcaggatcttcatgaggtagtctgtcaggtcccggccagccaggtccagacgcaggatggcgtgagggagagcatagccctcgtagatgggcacagtgtgggtgaccccgtctccggagtccatcacaatgcctgtggtacgaccagaggcatacagggacagcacagcctggatggctacgtacatggctggggtgttgaaggtctcaaacatgatctgtagagaaaaataaataatgttgtcaagttcagaaagccacaagaaacactcagggcaggtgaaactgtatggatagatctgagacatgcaaggagtgcaagaacacagctaagttcagtgtgctgggagtctcaggacaggggctccacttagacctactgtgcatctactcaatacacactccaaggccacttatcaccagcctcattagctttgtcacacgagccattgttagtacctaaacccacagcactgtagggtttaaacacctagtcagaaaggcaattgagagaaaaaaagacctcgtctgggaaagagcagaaactgcaaagatccaagggagactcagctcatagaagggagtcctatgggagaacggcagaagaaagacaattgagaaagggcgtggctgagaagctggccaaagagaagggttacccgggatactgacctgggtcatcttttcacggttggccttagggttcaggggggcctcggtgagcagcacagggtgctcctcaggggccacacgcagctcattgtagaaggtgtggtgccagatcttctccatgtcgtcccagttggtaacaatgccatgttcaatggggtacttcagggtcaggatacctctcttgctctgggcctcgtcacccacataggagtccttctgacccattcccaccatcacaccctgtggaagggaacagccttcttagcaccggcatcgatccccaagaaaaccccaggcttgccactcccaaagtaacaggtcacttacctggtgcctagggcggcccacgatggaggggaatacagcccggggagcatcgtcgcccgcgaagccggctttgcacatgccggagccgttgtcgacgaccagcgcagcgatatcgtcatccatggcgaactatcaagacacaaaagaaggctatagtcacctcggggccgccaagagcagccgctgccgccctgcccacttccggcaagccgcgggctcgagccgccagggggcgcgcgcccaagctcaggggacaaaggaagcgcagaccggccgcattattaccataaaaggcaaacgctggcccggaggcggacctagggcaggaagccagacctccgccccctccccaaacgggcgcaagctccgcctacactgcgccgacgggcggcttgtgcgcgcgcgggaggcgaccacacccagcaggaagcgcaaacaaggcgcccgtgccactgtgaccccgccccttccggacaacggccccgccctcgcccaaccccgggcagccgcgctcccagcctcaatacgcacgcgcagctaactaggaagagggggagaggaagagctccctccctagcgcacacgcgcctcgatgcccagtgatagagagcgcacgcgcagtggcatcccagcccccacccggccgagccggccctgccgcgcccgcccgcccgcccgcccgcccggcaagccgaataggcaaaccggtttggacaaagacccagaggccattgaggcgtgatcgtagcgtctggttcccaatactgtgtactctcaagatggacctaatacggcttttaacacccgcaagccgcaccggctcatcaaatgcccacaccgcgaccctagtgtgtccccaagccccacgcaccgagcgggagcgggcccacgagtgtctacaccgcgggaatgtggctgcaaagagtctacacgctaggcgtaaagttggctgtgccagtgtccgctccgcggcccggcaccaccctccacccgcccatggtgtccgttctgagtgatcctcaggaccctgcagtgaggtactagccacgagagagcgaaggcccgctgggcccggcgtccctgcttacctggtggcgggtgtggaccggcaacgaaggagctgcaaagaagctgtgctcgcgggtggacgcgactcgacagtggctgcgcgttgcgccgccgggttttataggacgccacagcggccactcgagccataaaaggcaactttcggaacggcgggcgctgattggctccgcgtcgctcactcaccggcctcgccgcacagtgcagcatttttttaccccctctcccctccttttgaaaaaaaaaaaaaaaaagaagaagaaaaaaaaaaaaagcgagagagaaagcgagattgaggaagaggatgaagagttttggcgatgggtgctggctccgtaggcccagatgtacaggaatagcctccgcccttgtggacactgccccattcaatgtctcggttactaggcctgcattctgggggtcacccaaccaccccaggaccctctgggtgtggatgtcacgtggatatcgagcacttaagtggatgagggtcagcatcgaggcccggaccctatttgtgtggcctcttgtttgagggacacgcggggcctggattgaatggacagagagtcactcccccttgctagcaattgctagcaatagccggaaagccagatccgggggggccccttctgctgtggttctaatttgctaggtgtgttggggttcaacttggaagcagaactctggttggagaggttttcatggatcttgacctcttagagactcaaggccatcctatcccaagcatagggcgagccccagtggtccaataactggaggtgttgcaagaagatgcctccagatatcccctgccccggatctagaaaggaactgtgctcaatagaacaaacaaaacttctcatggagtcaggcacttttggagaactgcctgatcacacccaggcaagactaagcctgggccgttagctagtgtctctgggtgactgccagacatcgctgggctggggcccaccatctatcctctatttattatgtgcagccacagctgagttgtgcactagtccatctgccagccgtggggattctgggagtgacaagctgctcagggaaaagttggtggtcaccggagccccaaatcctccagagagaagcagcccctgtccccctcacctaagtaccagtgttctacttagcaagccagctatttggctgagagctacacacggggtcagggttgagggccggatccctcagcttagcttagaaggacacgcaccttctgggagagtgtgacagaaagctggatttaggcaagaagggtgcttcaggtgagatgctctgggcctgccgtgcctcagtgcatgcataggtaggtgttcactggctcacaaagtgtaggtgttgaaaccaaagaaggcttcatccatatatggactacagtggccagcttccttgttcttggctggtggcagggcattttgaagttgctgaggccttgtctggaagaggtgaccatcaccccagcatatgctgtgaactggaaacacacccctagttatctttcccaccaaaaaaaaaaaaaaaatttgacaaaagtcttctgcagtcaccaaccctgagagaactttcccaggcagtctcctccctgcctccgggggacaggactgccctggccctggccttgtatttctcagttgctcaggcagtttgccagctgcccaaggacctgccagtcctgcaagtcacaggtgggggtggggcagggcaaatgctgcctgtcaataaggagagcccagagtattcccaggagaaccctggtggggtgcaagggagaaagatgccatcagccatcaggggtgcaggatgtggagggagcctcttgggtgacaccagacagctttactaggttagagcagaccagattcccaggcaggacctgtgttgccactttgtcacctctcagtcctgggactggtcaaggggcaggcacctcagccccacccgacctctgaaacaattctggtctgtcttgtctgcaatgatcattttccagtgttctctttcacattcttgggggtggcgtgggggggatttctcttggtttgttggaaattgagggtgggaggttgtttttaacagggtctcaggtagcctaggctgctctcagatttgatatgtagtggagtatagacttgaactgatccttctgcctttacatcccgagagtgttgtgattacaggcatatatcaccatgcccagcttctttgtttgaaacagtggctccctatgtagcccaggctggcctcaaactcctgctcttcctgcctcagcttcctgtgtgcttatgaagacagtcatggtgcctattcaggctagtcttaataactcagcacctcccccagcccggacaacataaaacaagccagccctttgaggggccccatcaccccccacttccttccactaacacacacacacacacacacacacacactgaggggctctgttctgtggaatgaatgagagatcgtctgggtgtcctcagccctgacaaaggagaggtccctgagaggccggcagaggtggagggggcctcagctgttaagtttggggtgcagacaggagacggaaagcacagaacagggtgggggtggggaaaagaggaagtggaggaaggggaaggcagaggaagtgaagctggccttctccagagaactttgccctcacaaagagctgtcactgttactgtcaggcacccagctggcagccacagcctggcccagagcatgggtgacacctgtagctttagtgcacttccccccacaagggtccccttccctgaaaagccttgggacgagagaatatttacaacctaattcaaggcccactctctgatcctcctctcagaagccatatgtcacttctcctggggacattcaagcccagctggccaggaagaccctaagctgcacattttcaagtgagaaattgaggaagaggggaacttcctgtcacagtagcaggagctctgtccaagagggcgggtccctgcagacagcaggatgtcagtaaggcactaaatgaatgagggagggcctggaacgttccagaaaacatactccctttttacaggttcagaaaactgagatgggcctgacagagcgcccagtgctttaagatccagccataatgcctctgtactcaggggcccctgagctaacagcctgccctctgcctcacagggcccctccctgggtaaagtggcctctggaatgtccccggggactaggtccaaggactgctccaaagttggaattcctggccccacctcctccttagtacatatttctatctctcagagttcaatgagggcaagccaaaggccctggtcatacgtagggtaccaccggaaaagtctactggatgcctgcttgcagggccacctcacccatgctctgataaccctgactccgcagggctttttcctacaggaggtttgtccaggagtgtgggttcctccagctgattaacttctcagcctttggggccagcttcaggctgccctctccaggcccagagagcaagtgatcagggaagatgacccagaaaaggaatagcctggggccaaagcagatggccctttcttcccaaacagcttcggagttactcagttaccatatctgctgcctgcctactcagcagccaaaaggctctgttctgagcagagggagtaaagcaagcatgtgccttgagatagccctaaaagaacgttcgctggttccgggaaggaagcaaagatttacttagggaagtcttttttccccccgagttaggtagctcagtggacaaaggcacttgcttccttactgtctgagattaacctctggaaaccacatggtggaaggagagaaccaactccctcagtggccctctgatctgcacattaaaatcacaccacacattccccaccacacccacacccacccacccacctccacacacaaataaatggaggggttttgttttttgttgttattgtgtgtgtgtttgagacttcttttttccttttttgggaaggggagtttgcctccctcctaatttttgaagatttatttattttatacatatgagtacactgcagctgtcttcagacagaagaaggcatcagatcccattacagatggctgtgagccaccatgtggttgctgggaattgaactcaggatttctagaagagcagtcagtgctcttaaccactgagccatctctccagcctcaagataggttttttttttttgtttgtttttttttttttttttttttttttttatgtggccttggctattctggaactagctctgtagatcaggctagcctcgaattcaagacgaccatcctgcttctacttcctgactgttgggatcaaaggtgtgcgccaccattgcccagcctaaaatatttgaaaaggtttatgtattactttcacttaggtgtacctgtgtgtgcctgcaggagtttatgtgtagcacatgaatgcaggtgccaaacagttgaaacccacctcatgaggacgctgggaacggaattcaggtcctcggcaagagcagtaagtattcctaaccactgaggcatctaacttctgacctagaactcttgatccccagcgtcacggggaacggtaccacactcagtttacacagtgatgaattctgagtgtgtgtagagggggctgtgtacatgtgatagcttgaagagtcaggtctcttcaccttgtgggtcaccagggatcatcaggcttggtggtaagcttctttacccactgagacatctcactggcccgtgtttgctcattggtttttctttacggcaagttctcatacagtagcccagcctggcctcaaatccaaggccaagcacttagattagaagcacgctccattgaaatgggggaacttattaaagttcttgggagagttttgaaaaatccttttaaaaactaccttctgtcttggccccctagggcaccaggaaaaactgccccacccttctggggagttcccagactttcaaattcagagtgatttattcagaaacagaagagaaacttccaggtcttccccttcatacgcactagtagaggcctttctgcttgccctagggcaagcaggattcctgttccttgcttccagatgggaatgctacccaatgctcagtgggaaggcagtgaggaatggagggaggctagggtatgggctgatccctggatccaaatgaacagcctgcaggggagtggccaccagctctctgtcacccagaggctgaccttgcactctgctggttgtctaggtagaccagagcgcattatggggtgacaatgagctggctcattgtccagctagttcagatattcagtcaaggtgatcaccagttcgaggtctgccaaaggtatataaagaacttgtctcagagagtttgaagaaattactcagtggtagagcatttgcctagactactcctggggtgggggggctgggggggggctcagtggtagagcacccgcctagactaccccagttcggggttggggcctggctcagtgtagagcatctgcctaggtccttacagtgaggggctggaggtatggctcaagcagttgctaattcctgatgggtgttgtggtgcgcatgtttcatcccagcactaagaaggcagaggcaggtagatctttaacttccgaggccagcctggtctacacagtgagttttagaacaaccagagtaacaaagagcaaccctgactcaaacaaatgaaaaaagagtggcccctgaagcatacaaaaccctggattccacctccagtacagtaaacaatacaacaggtagacagtccagagtgtataggaagccaaggtctaaaggtcaggccaatgctggatcatgtagtcaatatcagtagaggacttagctttaacaaccagtgtggcagtgtacgcctttaaccccagcactcaggaggcagaggcaggtgggcctctgtgagtttgaggccagcttgttccagaacagccggagctacacactgagaacctgtctctaaaaaccattagataaataaatagataaaaattcagcctgctctggcttttggaaatgccccttgtaagtagagaagtgtagttacctagggttgcccgccttggaggaagtggaattgggagggagacttgggtagatgtaggtgtgtctggccacagctgactcataggctgagccctaggggtcagcctgtgccttccctcctggcctacccagcttgctgagagcctacagggcactaggagctacccctaatttgccacacccctacccagtcagccggaatctccctgttccttagatgagcaaacgagatagtatcagaccaaatatggtggcatgggcctatcactccagctcttccaggggctgagggactatgactaggaaaacgggaggaaagactatttaaaaaaaaaaaaataaatgactatagtgatgcacagctataaccccagcacctaggaggcagagacaagcagattctatgaggttgaagccagcctatctagtgaattccaggctagcctaagcaacatagtaagaccctgtctcaaaataaaaagaaaaaagaaaaaagaaaaagaaataaaatttcgaaagggctggttttgttctcagttgtccagcagaactgaatggtaagaccttattactgaagacacactagtctttggtttcagagcctagaaaaaaatcccccttgaattgacctgaaaaattcctctctgctggctagctttcatggttctggaaggtgctagctatgtaggccacaagggtggggtaggggtgagcatcagtggtattacccagcagcgaagcctgcatgctacaacggtgacctgccaaagatctgttcattggtgtagtagcattggcatgaaggctagggcggtaaccactgctttctgattggaaaccagcaagcaatgtaggtgtagactgtaaaccttgccaaaagcccatggctctgaagatcacaggccctagggaggaatctcctactgttgttttactaatgaatatcttgtcaagctcccttccaaatattcatgcttacacccatacattgacgttgctcctaacattaaccagaacagcctttctcaaggggtcagctgtgaacacagtcatgagtctaagactagtgctaagaacaagtgagcagaaagtgctgaaccctaaatgggtcatccagggctggagagatggctcagaggttaagcgccctggctgttcttccaaaggatctgggttcaattcccagcaccacctgtctttgtctgtccccttccagttccaggggacctgacaccctcacacagacatacagggaggcagaatgccagtgcacacagaataaaaataaatagtaaggtatttttaaaaatgagacatctatatcaaattcccaccccaccttcttttttgttgttgttgttttttgtttttcgagacagggtttctgtccaggtggctgtcctggaactcactctgtagaccaggctggcctcaaactcagagatccacctgccctctgcctcccaaatgctgggattaaaggcatgcgccaccactgcctgactcatcccaccttctaaaagtcagagaacacaccagaaaagagaagggaaaaaaatgtaagagctggaggatgccgaagaatcttctggaataatactgtttggagacctgatgtggcctattagctagaacagctcagacagaagcagccaacaagatgtcccagcaggctgcatggctgagcaggacacaccttgagtcctaggacttaggaggcagaggcaggcagatctctgtgaattccaggccaggctggtccatacagtaagctgcaggccagccaggactacatgaaaaccttgtctcaaaaccaacacaagggtggagatggggacctggaggtgggggggggggtgactggggaatgggtcagatacctaggggagatggtaggggaaagtaggggttcctgaggggagctgcagagaaacttggggtgtacatgatcaaaatacattgttgacatgtatgaaatgttctacatttcatacatgggtgtggtggcatacaatatattatattgtattctattccattaaaataaataaggggccagagaggtaacagaggttaagagcatttgttgctctcgtagagagggccagagttcaggtcccagcatctattactccacaaccatctatacctccagttccaggggacctgatgcccagtctgcactaggcacatgcgcggtacacacacaatgatgtataggcaaagaactcctacacataaaatgaataaatcttttttaaaaatgttaagtacgtaagtaaataaaaaggactggtaaaccaagtcatgtcggctcagtcctgtaatccagtcccttggaatgaatgacgtagggttgccagggaccaatgggacgaggctgtgagtttcaggccaagctaagccgcagacacagacacctctcaaaaacaaacaaaccaacaagggctgggaagtggctcagctggtggaatgcttgcctaaggtccacaaggctctgggttccttcctcgatttcatgtattagaggcgtggtggtgtatgctgtattcacactcaggaggcagaggcaggagggctggaacaaagttaccttcaactccatagcaggttccaggccagtcggggttccacgaaatcttgtttcagataagtgaatatgtcaacaacagagtgcggtggggccagccaggtgtcgcggtggctgtaagacctcattcagcaagtctggcaacctgtgcttgctagccagaagtcacagcagaagcagagaaccgacttctgaaagctgtcctcctacccccgtgggcttgccgtgacaggtacatggtcacgcacccgtcacacacgctgttaatacaatcttacatttaaacttaaaaaagaaaaaaaaatcagtgaggaacattctcactgtgtagacttagccagcctggaactctgtgtgtagaccagacaagccttgaactcagagatctgcctgcctcttcccgcttgtgtgctgtgattaaaggcctgccctacttatgtctggcttagaaaacaaaaacttaaggtggttaggggtgttgttcagtggtagagcacgcacctagcatataagagccctgtgtttaaatcctcatgtgccacatgaggtcctgtgacaaaaaacagtagcaacaacaacaaaaatggatcaacaagatggctgagcggtgcccggcatggtggcgcacgcctttaatcccagcactcgggcggcagaggcaggcagatttctgagttcaaggccagcctcatctacagagtgagttccaggacagccagggctatacagagaaaccctgtctcgaaaaaccaaaaaaaaaaaaaaaaaaaaaaaaagtagaaaagactggttttcattcttagctcccacatgtagctcgaaattgtaactccagtcctagggagatccaataccttctagcctccaagggtaccaggcacacatgtgacacacagacatacatgccatacccacgcacacagaataaaaaaaactcctttaaaaaacaaaaacaacaactgaggtggtagcgcatgcttttaattgcagcactctggagctagagacagaggcaggcagatgtctgtgagtttaaggccagcctactctacagagtaagttgcaggatagccagggctatacagagaaaccctatctcaccccctccccccaaaaaaagacaggaaaagaaagtcaaaaaaataaaatacacaggtgcacagcacaattttactattactaaaatataccagaacgtaattgtctgcaccatagcgagcctttgggtcttccacagagtccgggatttgggggtgccactgtttttgaggcccagttcaatgggcacacagaggctcggcaggcactggctcctgtagccacagggcctgggcctggcccaagtttggaaacccgatcagccacaggcaggtcaccttgtaacaaggcctttcccagccagaaatctcagcctgtttctgggctagccaagaactggagccgtctgatggatagcaggcccagctgtctcggcttcctgtgggggacatctgggacttccatgctacatacactgcccacaggagaaccacaaccacacactgcttagtagggctcagtcttgacttttctggcgtgtgtttgtttgtttttgcccttttgagacaaagtctccctatttagtctggatggcctgggattcgctatgtagtccaggctggcctcaaattcacagaggtatccttagctctgcctccccagtgctgagattaaaggatcaatttgcatggctcatatgagtagcagaggcatgagacataaatgcacctgaggctggggaccaaagaaagaccacactgggaaaggagtccagacccacattggactttgtggcaagccagcttcggtcagtactagaggccaaaagcccagaacaacctcttacctccgttcactttaaggttccattgagcagtccactgtggatcctggcctttcctcctgtgcaccacgtcgggctttgtgtcaagaaagattcagctgtgtcacccactgatgtcacctgggtctgggtgtctttgggaagtgactccacttgtgtgagcccacaaggatctgtgagaatctactgggggtgatgggggcatggtgtttcatcacagcccctgaagagagcccaggagaggccattggtgaaagagcagcccagttgcagcaagagactcccagcattttggagatgccagcgccatgagatgagcaccaaggacagcagtggccgtggcgcggaagacaagctgtgtgtgtgctgcagacgaggcacccagaagatcacgactggatcccagacgttgaacgtttatttccatgttggaatttggttttgctttgctttgctttgactgtgactgtgccctggttctttcctcttgaagtaaggaagcatttgacttatatttacactggaacttttaaatgaaattttggtgttttacagacttataattcttttcccccgtctttttttgtttatttgttttttgttttgttttgtttgtttgtttgttttggtttttcgagacagggtttctctgtgtagccctggctgtcctggaactcactttgtagaccaggctggcctcaaactcagaaatccgcctgcctctgcctcccgagtgctgggattaaagggatgcgccattacgccggcctcttttccctttcatcttatatgcattggtgttttgcctgcatgtacattctgtgtgaggatgtcacatcttggagttacagacagttgtgagctaccatgtcagtgctggaatttgaacctggttcttctggaagagcaacaagtgctctttaccgctcttcagtacccggactttgaatttttttcggaggcctttttttttttttttagattgttttttgttggtttgtttgttgttttttgttttgttgtgttttgtgacaggttgcttttgttgccctggtttttctgggactcactcattagagcagactggcctcaactcaagagatttgcctgcctctgcctccagagtgcttagctgctctttcaccaatggcctctcctgggctcttttcaccatgcccccatcacccccagtagattctcacagatccttgtgggctcacacaagtggagtcacttcccaaggacacccagacccaggtgacatcagtgggtgacacagctgaatctttcttgacacaaagcccgacgtggtgcacaggaggaaaggccaggatccacagtggactgactgctcaatggaaccttatagtggccggaggtaagaggtatgctcctgggtgcccggctcttctgggatccctgggctgatctcaggaggtgaagattttggcccctggtacagtgtgaagccagggtaaaagcatgcaccaccgccagagaaagatgttttaaagcattttaactggtaagactgtgggacatgtgaagttgtaaatgttttaacctttaacctggtaaacaatgtaaacatttaagggtttaaaatgtttcacagcctggcagaggcagttggatttctgagttcaaggccagcctggtctacaaagtgagttccaggacagccagggctatacagagaaaccctgtctcgaaaaacaaaacaaaacaaaacaaaacaaaacaaaacaaaacccaaaaaccaaaaataaaaaaataaaaataaaaaataaaaaatgtgcattgtgatgtcatattaatgtgtgatcttggggatgaacaagaagaagacaagggtgtgacttaacagagacccagagacaagggggctgcttgttatgctgaatagttttctgttagcctggtacaagcttgcggatcgaggagggaacgtcacttgatgaactcccccaggagactgggctgtaggctgaaggctggagttgagcctaaggagcagtttcttaattagtgacttatgaggtggacccagcccacggtgggtggggccaccctgagctggtggtcctgggttccataagaaagcaggctgagggctggtgagatggctcagtgggtaagagcacccaactgctcttccaaaggtcccgagttcaaatcccagcaaccacatggtggctcacaaccatccataacgagatctgactccctctttgggagtgtctgaagacagctacagtgtacttacatatagtagaaaagaaaaagaaaaagaaagcaggctgagaaagccatggggcgcaagccattgcctccaggtccctgctctctttgactttctgtcctgatttctttcagtgacagactatgatgcagaatcataagccaaataagccctttcctccccagcttgattttggccatgatgctcatcacagcaataggaataggaagcccagctgagatcctgtcatgccatccatggcttggtggttaagagccctggccacagccaggggtgtgggggatgggtgtgggtgtaaaggtggcacacacctttaatcccacctttaatctcaggaggcagaggcaggtggatctctgagtttgaggccagcctgatctataaagcacatttcaggacagtcagggctacagaggggaaaccgtgccttgaaaaacaaacaaagccttggctgctcttgcagaaacacaggttaggttcccaggaccctctcagcggctcactaacaactgcaactctagttacctcttctagtttccgtgggcaccagtaccaggcatataagtggtggtgcacagacatacacataggcaaagctctcacacacataaaatacaacttaaggggctggcaagatagctcagcgggtaagaacaccaactgctcttctgaaggtcctgagttcaaatcccagcaaccacatggtggctcacaaccacctataacaagatctgacacgctcttctggcatgtctgaagacatacagtatacttatgtataaaaataaataaaaatctttaaaaaaatacaacttaaaaatataagatataaaactgcactcatatatatgtatatgcattgtattatatatgttaaaagcagaactactaataggagaaatgattgtatatgtaaaacaaacaaatataagctcctttgcccttcctgtgtcttcagaactgaagctgctgctaaggtggtcacacccagccttgccaactgtaggcctccccattggccaggcggtgacttttgtcttttttatttattttatgttttggtttggaaagacagaggaaggaaggaaggaaggaaggaaggaaggaaggaaggaaggaaggaaggaaggcaggcaggcaggaagggaagacggaagggaaaggaaagaaaaagaagagataaggaagaaggggggaagggctgtcttgactcaatcctgtatcaaaagtggggggcagggacgttgtgtggtaactgtctggggaggtgtcccagtccaggagggtgtgacaccatcttggcagggagtgtgtctgacacggggacggctgataccacacaggctggggaggcaaggcctgagctagcttggtgcttacaccacatagcggatgttggcagcagggagcaggggtgtgtcacaggaagtcctgagctccgtgagcagctagtgactcacccacagtactcacagttcagactccagcctcactctccagaggcccccagggaaagcaatgaagtctgatatctcagaatgcgggaggggccagccctgactgtgcggcagggagggggccttgccagggtcaagagtctttggggtgggttttatcgtctgaattggagtccaccaaggagtggttttggaggaggggtggacagaagggcatgttggggaactgctagttcctgatgtagtagacactttaggaagtgaggttctcctaaggtgacctgggctccatgctattgtgttgaccaactcccaggccgtccatatccacctaagaaagagcccaggcaagtgagggctgggtccactgtaggtatttattggcgagtcttcttagcactgcctgttcgtccccttttgatactgataattctggggcacggcttgggaaaggaaggccaaagggacattatattcttggccccaaggggacctgctggacctcaaattgagattccattttctgacagggaagtggaggatcccatgccttcactcagcctggtttctgaatattggaggggtaagagtgaagtggggctggagagatggctcagcagggcaagccggaggacccgggttcgagtcccagcaccaacatggcagctcacaaaccctctgtagctctagttccaggggatcaggcagcctcctctggcctctgcaaagcactgaccatgcaagcaagcagtgcacagacatgcatgaaggcaaaacgcccatatgcacaaaattaaacatttgaaaacaagccaggcacacatgcctttaaacccagcacttgggaggcaaaggcaggtagatctttgtgagttcggggccagtgtggtctacagagtgagttccagggcagctagatctacacagagagacctggtcttggggaaaaaaaatgaaaacaagaggtgagagtctcctggggttgggcagaaattaacatgtggaccagtgcctgaggaatgtgacagagggcagaatgtgtgcccaacagccagttgccctgtgtgtaagctccaaaccgggtgtggcaacacaaactggaaggttagagttacttccttggggaggtagaggcaggaggagcaaaagtttcaagtcagttttgagtccatagagggtttgaggctagcctgggctacatgagaccctgtctcaaaactaaaattcaaaaaacttggtgggaactggggaccatgccccagaacagagaacagaagggagacaggatgacaagaaggctcactaagagcacttgccgcaaagcccagtgacctgagttttgtggccccagggtatacagaatggagaggcttgtttctcaaaataggacctccacacgtatacctgggcatccagaacccacaaacgtatgcccataagatagaccatcacccagggctacccagcagaatgtggctttggaactcagccaggaggtgaaaaagtgctgtagcagcctagagattcgctgatgtccccaaatgcctgggacaaggttgcttctctggtattgggatgtctggggctctctgcacctgggactttgttcttaaagggcaataaggaagccactgagagtgtgcgacaaggaaaaggctaagccagcattccagaatacaggtaacttgataaaaagccctaagggacagaaggactgctccgtggggaaaggcactcacttgctgccaagcatgatgacctgagttgggtctccagaacccacacgctagaaggagaaaacccaagtctgcaagctgtcctctgcatgtcttctacacacatgtcagggcatgcacgagctcatgcctgcaataatacatacgtaaataggtgtgatagaaggacctagtaggactgcaaattaaactcacgtagagcccagacttagtgtggggtgagcccgggtttgcaaaataaatgatcaacataataaataatgataataatgagcggaagactaatagcgctgaagggatctcaaaaaacttggatttttaaaaataggatgggctggagagacgtctcaggagttaagagcatttgttgtttctctgcagaggacctgggttcaattcccaccacccacatggtggttcacaaccatccttaacttcagttccgagggagtctgatgcccctttctgatttgcatggacaccaaagcatgcatacgggcaaaacactcccacagaaaataaagtgaataaatggaacaaaaaggtttttttttttaaatatgcagccaggcatggtggcgcacgcctttaatctcagcactcgggaggcagaggcaggtggatttctgagttcgaggccagcctggtctacaaagtgagttccaggacagccagggctatacagagaaaccctgtctcaaaaaaaaaatgcacttatttcattttgtatgtatgtgcaccacatgtatgcaggaacccagaggtgagatgaggtgtcgatttcctggaactggaattacaggcagatgtgaacagccatgtggattcttggaacccaacccaggtcctctgcaagagtcatagtaaatggcttccaactgaagccatttgtaatttgaaacagtatccatggaaacataggtagggatcatacaggtaatccagggttgtgggtaccttgctccagtatggagatctaggacttctcctgggttcctgagtactgggtgcggctgtgctcacctggatgaaatgaggaggcgctgagtctaaccttgaaatggggagtcactgagtctaacctgctgttgcagtctctcggcagctggccagagacttttgagggttgttaagggctggggctggaggccaagcctgtctttccagctacaaggaaggctgaggcaggaagatcaaaagttcaaagctacacagtgagtccccagccagcctcaaaattaaaagtaaaaagagggctggggcgtggctcactggtagagtccctgcctagaatcccccagtgagggctgggagcaaggctcagtggtagagcccctgcctagaatcccccagggaggggctgggggcgtggctcagtggtagagcccctgcctagaatcccccagtgaggggctgggagcaaggctcagtggtagagtccctgcctagaatcccccagggaggggctgggggcgtggctcagtggtagagcccctgcctagaatcccccagggaggggctgggggcgtggctcagtggtagagcccctgcctagaatcccccagggagggactgggggcgtggctcagtggtagagcccctgcctagaatcccccagggaggggctgggagcaaggctcagtggtagagccactgcctaggatcccccagggaggggctgggggcgtggctcagtggtagagcccctgcctagaatcccccagggaggggctgggggcgtggctcagtggtagagcccctgcctagtctttctttgttcctggattccatcccaaagctgtcagcaaaacctcagcaatgtcaagctgtttgattactgctctttccggggaggggctcaggccatctgcctcaaaggcagggtaaagagaagagggaaaggtgttcaggggtcaccagatgagctaaatttcctggttaggtgatagataatccacacccaggggcccctgaacccagggcagagagcgaagggtaaagtgcgggcacaaggggcctcggcctccgcctgccagccaaggactgcaggtagtctatactgtgatagttgtgatagttaaccttccccgagggtgcgccaggtgtggcaccagcctcaagctgaactctcagcttcgagctcttcccccctccccaccccagtcattcaggccccgcgggcagaaagcagatatttgctaagagtctcagaaaagtcaggcacacacacagacacacacagacacacacacacacagacacacacacacacacacacacacacaccatagtcaaatgctgaggcaggagaataactgggagttaaagtccaactagaattaccagccgggcgtggtggcgcacgcctttaatcccagcactcgggaggcagaggcaggcggacttctgagttcgaggtcagcctggtttacaaagtgagttccaggacagccagggctatacagagaaaccctgtctcgaaaaaccaaaaaacaaacaaacaaaccaactagaattaccaagtgagttccagatcagacaagaatacagagaactggtctcaagaaaagaaacacaatgcaaaatatagttaagctaggcagggctgcagagcctgtgtcccagggtgctggagacatgggggtgaggttggtcacttctgctacactgaggtcaaatactggactacatgagaccctgtctcaaaaacaaaacaaaagaccaaaagaggttcttgggagacaccgtgatagctggtaaagtccttgtttagtggccataaggacctgagggtgtctcctctgtacctgtaaccctagccgctggggtcagctaggaagaccagcattcacctacacacacccatacaaggcaggcaggatagaaaagggaaataaacatacaaagcttcagccgggcagtggtggcgcacacctttaatcccagcacttgggaggtagaggcaagtggatctctgagttcgaggccagcctgatctacagagggagttccagccagggctacacagagaaaccctgtcttgagaaccaaaatgaaaggtgggggtggggagcattgtgcccccagttccaacatttccaaggctaaagcagagggtcagaaaagtcagccttggcttgatagcaagttggaagtcagcatgggctacaagagattctgtctcaaaaaccaaagcacagaacagtctctggtgtagttccgtgtccaggcagagatctcttagccatctgtgactggctatccatgagtacctggcctgtactctgaggtctcagccctgggctgagtacctgggtggtactccccagggtgatgggggagctgggtggcaaggaggactcttgatgggagttaagtagagtcctgaggctggaggcgggggtgcagggaagaaccccagtaaaggggtttctccatattttctcttgggacagagtcctattaagtggcagaggcctgctttgaactttcaagccttctgcttcagtagctgagataacagactttggctcccaggcgcagctgggtgttgtcagtgctattctctttgaaaggtttaggttgggactcacaggctccctgtcacagggctttggggcaggtgactacctcttatctgatggttatcccaccaactcatgcgggccggcctgcctcggcgccttctgagaatcccatagctctctatctcagctctggagataagccaggcagccccccccccccccaccgcgcgtccctgtccagcacagcctggcccaggctccctgcaggcccaagccagtccctaccccaccccctcagctagcccagcccacttggcctaacttcctctccttaaaaggctaaattctggagagtagggagggggcgtgggagcctcagcgtagctgtcccctctaccctcagggagcagcgggccaacctggggaaacaggatgaagccccagcacctgggggttcatgagatccctatctgggaaccccactacaggctcctgcacaggaccctgcggacatttctcgctttcttctctcttgttcccaaattgggcagaaaatactgactgaagccccagggtggccagacctgggctgtggatttgtggtaattagggtgtcataggcaaaagatgccctggggccccaaggggctaccttggtctcttttacaaattctcccccccccacacacaccgcaacccctccccccgggtctctgtctgtctccctctcttggtttctgtctctctctgtgtctctccctgctgaagattaaacccaggtctttcacatactagtcaagaggtctctatcacactgagcaacatcctgtcagcctcccttccctttctctcaggacagaatcacactaaattgccagggctggctttaacttccaatcctcctgcctccgtagcatctgagatgacaggttcatgccaccgggatcaactgggagtttgttgttattctttgtttttgtttgtttgtttgagcagagacgtagctctgtatccctggctagccagggacttgctgcctagattaggctcatccccaaattgctgtgctcccttggctctgcctcctaagtgctgtgtctacataagagggccgccatgtctgccttccattagtgtttctggagacaagtctttctccaaatgagactgacctcagattcaccctgcagtccaagctggcctggaacttgtagcaatcctcctgctttcttcagtgctgagcttacaagtgagtctccacacccaactttttgtctacagcttcagtatccctgtttgtcagcggggatgcttcctgccaaggctcaaactccaagtctcctctgagaagcctactcctccaggaccatagacacagcgaggccaggatcaaaacttggaagctcatcacacaaagttccagtgtggcctgatggtgcccctgtactagctacttggaagggcaaagctggagccggtcatgagttctaggacagtctggtcaatttagcagcgtgcctccattccacttcgccccccgccccacaaaaagtaaagagggttggagggcggggaacatagctcccacagaagagcactggtcaagcaggcatgagatgtgggactcagaccctcagcgcagggtagcgtaaaccggatatgacgatacctgtcagtaatgccagcatttggaaggtgaaggcagaaggaccagaaattagtggtcatccttgcctccatagggaggcagagggaagcctgggctatgtgaaacccaatctcaaaaacaaatgactgataggggctggagaggtggctcagtggttaggagcacttgctgatctcacaggggtcctgtgtttgactcccagcacccatgtctggtggctcccaactgcctgtgactctaattccaggggatcctatatgtctggctcccatgggcaccaacagttacatgcacatacccacctacaaacacacactcatacacatagtcaaacaaaatgaattgccagatgtgcaccaccactccatgccacacacctttgctatagatgtctgtgagttctaggccagccaggtctacacaatgagaccctatatcactccaaaaccactaaataaataaatcaataaatcttagctaggagtgtgtgtggcacagggctttaatcccagcactcagggagacagaggcaaacagatctctgtgatttcaaagctagccaagaatatacagtgagactttgtctaatataataataataataataataataataaagagaatgccatgcaaatagctgttgttggttattgttggtttttttggttttgagagagtttcagtaggtagccctggttgtcctggaactcactatgaccaggctggcttcgaactcacagagatctgcctgccaatgcctctccagttgctggaaggtcagtgtcaccatgccaggccataaatacaattttttttattacgtatcttcatcaatgacatttccaatgctatcccaaaagtcccccataaatacaatttttaaaaaagaagaaaagaaaaagcaaggctgtggctacagcctggtggaatgttctaggccctaggttcaattctctaaagaagctctgtcctgcctccctccccacccgccttgggaatgtcagtcatccaaccaggccaaggggctggagagctggggcccttggctgtcctttggcctcaagtactatgcaggaccctgagccgctctccatctaagctcagagcctcagtttccatttctgtacttcaaggagggaggggcctggcctgcagatggggagagcggtgcacagctgggtttgtagtgggaactggggtttggcagggttggggggctggggtgtcccctccctctgatccccgcccgcggccgctgcccacgagtcgtccataaaaggcaaggagcgcaagtcgcgccaaacttagtcatgcggcggcggccggcggctgcccgcgcgacttcctccgccgacttcccgtttcgagagcgaagcccgcaggggatgtgaggtgtggtcctgcctttcgaaatggctccgattcccctaaggggatccgcggtgccggcgccctgcagaggggaccgctaagggtccgcgggcacacacccgggcttgtgtttgagaaagtggggatggggtgggggttgggtgaaggcagggaatctcagatagcccaggctagcctgccttagcctcggagtgctggaatctcaagagtaagccattactttgggcttaggaatgcatgaagggcttccagaaggcacagctgttaccctggagctgggagggagcttggataaagaggttaggagagcattgtttgttggtgttggagcaagtacctcatccgtgctagcccagtgctccccctctgaatgttctagactgtatttctttgaaataagatcttgtgtaggtcgtcaggctggccttgaaccctttctttcttgttttttttttttttttttttttgagacggggtttcactatgtagctttggctggtttagaactcactctgtaaaccaggctggcttcaaactcagaaatctacctgcttctggagcgctggcataaacagtatacagctgggccttgaagtcattctgcagtctccaccttccaagagccacataaaccaggcaggcctctggctgcctctgcctcccgagtactggaattaaagctctgccccataatgcatgacttattttattattttcttaaccatttatattgagacaggatttcaatatgttgcccaggctggcccgaacctgttctgtatccaggtaggcactgacctgtttggatttttggatttttaaaaaaaatattcgggctggtgagatggctcagttggtaagagtacccgactgctcttccaaaggtccagagttcaaatcccagcaaccacatggtggctcacaaccatctgtaacgagatctgacaccctcttctggagtgtctgaagacagctacagtgtactttacatataataaataaataaatcttttaaaaaaaaatattaatttttaatgggcatgggtgtttttgtctatatgagtgtctgtgtaccaggtgcagacggtgccttcgaggccagaagaaggcactcgagctggagctacagacagttgtgagccaccatggggatgctgggaattgaatgctgtcagtgcttttagctggggaagaaacagttggtctgtgggcaccatgcttgtattccttcagatctgtacttttccatagattggaaatgtcttacctggtgtggcgggcaatgcaggtctataatcttagcactagggaggcagaggggcaggaggatcaagagttcaaagcccatcataccaagttccaagccagccaaggcaacaatgagaccttgcctcaagaaaagatactttctagaaacaaagagacaaaatggctgtcccgaactgagtgagctacctcttcccctgtttcttctaggctataagacactaatctctctagagcagtggttctcaaccttcctaacgctgtgaccttttaatgtagtccctcatgtggtggtgaccccccaaccataaagttatttggttgctacttcataactgtagttttgctactgttacaaattgtaacatataaagatctgatatgtggcccacaggttgaaacaccccccacccccccacccccgtcccccgaactaggggttgttatgaaactatgacacacaggctgaggcatgagtcccacgtacacagtaggtgctcaacaaaggagtctgctgtattgagcgtcctttgtctcagcctctctgggagatgggaagactaaggtgggagggatccgctcactgtggctagttcatggctagctgtaaaggcttatgtttctaaggaatggggccagccagtcccaaagctcagactctagtcctgtcctgtcctgtcctgtcctgtcctgtcctgtcctgtcccttagcctggggtcactccaggtaaggctcaaggccagcacacttagcaggacccagttgggcaggtcacatagactccagttctaggtgtccggaacctcagccgcctgtttggacagtgaggacgtctcggggcaggtgcagagctcacggaacccctgaggtagagaggatagcgtaggctgatgaaagggctgcagtgacagagggcaaagaggactggcctggtggctcatgcctgggattccaggactcaggtggctaaggccagaggccagaaagttccaggccagggccaacaagatggcttaggtagcgtttgtggtgcaagcctgaagaccaaactaagttcagtggccggaacccatggtggaagagaagcagtctcccagagtttctctgatctgcacgtgtgtgaataaaaattgagacagggtctcactgtgtatcccaggctagcctggagctctctgcctgtcgctgcctttaccccccaaatcccaaatgctgggattaaagttgtctgccacatggagtggacacgcccactccaatgctcaggaggcagggcaggcagacctttgtgagatcaagggtagcctgatctcacaaattccaggatagccagagcttcacactgagaatctgtcttgaaaacgaatgaacaaaacaaaaagaaagaaattgatcctacgggtcctcttgtgcatgtgtctgatgccctacccaaatcctccaggggaaactccccatgacccctcacagtttctttttctttcttccttcctaaattttcatttttattttcacacgtatacagatgcttgcttgcatgtatatctgagcaccaggtgtttgcctggtgcctttgagagtcagaaaagggcactagctctcctggaaccgcagttacatgaacttgtgagcaccgtgtgggttctgagaattaaactcccgtcccctggaagagtagccaaggctgttaaccaccgagctatctatttctccagcctctcgagtcttccccaaggtttaaacaacttggccagaatgcactaaaagtgatgggggtggggtgctcaagaggaggttgagtggggcagctgcggctctgtctggtaggagcagaaaggaaaggggaggtagtgtgagggatcaggcagagtaggtacaaaaactggagaggtccagtcagggcgagaccagcaggccagagacctctctctggcgccacttagtggcaaaaccttatttcttgttctagtcctccatatccccaaggtacactggtgagggctgacatctcagctactggcatcaaggaccaggcttggtggctcaccattgtaatcccagcacttggaaagacaggagatgaggatcactgatttacaggccagcctgggctacatagtaagtccaggatagactgaatccttcttaataaaacatagagctgggcagtggtggtgcacgcctttaatcccagcactcaggaggcagaagctggggtctctgagttcaaggccagcctggtctacagagtgagtcccaggacagccaggatcgatcacacagatcatttctatcttggggaaaaacaaaccaaagcaaaaagcgtgggctggcaaggtggctcatcgggtggaaatgccaagcctgccaagtctggtgacctagtttaatccgtggcatgcacttaatgaaaggggacaactgagacctgcaagtcctcctctggcctctgcaaaagtgtctgggcacgcaggggaaccacttaaaaacaagaaaaaaaaaacccagcatttgtaactgacttggaatacgcataggatgaaaacgatatgtagagtgttatatgcttatgcttaggggtaagaacaaatgtcaatatgttcagcacagacagttttgtagaaagtattcctatcaaggtgtggtggcctattcctgtatcttagcactctggaagcagaggcaggaagagtgggagttgtaggccagcctgggctacatggccagaccctgcctatgaataaacaaacaaacaaacaaacaaacaaacaaacaaataaataagggctagagagatggctcagtggctaagaacatgcactgctgccttgcaagttcagttcccagcaccccacaggacccatataactccacccacaggacccatataactccacccacaggacccatataactcccaactcaggggaactgacattctggcttctgtgggcatctgcactttcctgcatgaactgaaaccagcacagataactaaaaataaatctccctggacctggcagtggtggagcacagctttaatcccagcacgtgggaggcagaggtaggcagatgtccaagttcaaggccagcctgggctacagagtgagttccaggacaaccagggctacacagagaaaccctgtctcagaaaaaccaacaacaaaaaagaaatttgggctggtgagatggctcagtgggtaagagcacccgactgctcttccgaaggtccagagttcaaatcccagcaaccacatggtggctcaaccatccctaacgagatctgactccctcttctggtatgtctgaagacagctacagtgtacttacatataatcaataaataaatcttaaaaaaaaaaaaagagcttaaatgcctgagtagctactttgaaaaaaaaaaaaaaaaaagaaaaaaagaaatctccctgggggttggagacatggctcagtggttaagagcactggctgctcttccagaggttctgagttcaattcccagcaaccacaaggtgcttacaaccacctgtaatgggatctgatgccctcttctgacactcaggtatacatgcagatagaacactcatatatgtaaaataaataaataaatacatcttttttaaaaatcagacccagtggttctcacatgccggaatcccataaaaaattaattaaaaaattttttaggggctggtgagatggctcagtggttaagagcgccgactgctcttccaaaggtcctgagttcaaatcccagcaaccacatggtggctcacaaccattcacaatgaaatctgatgccatcttctggagtgtctgaagacagctacagtgtacttacatataataaatgagtaaataaatatttaaaaaaaattttttttaataagaaaaggaaggaatcttctggcagtggtggtgcatgcctttaatcccagtgtttgggaggcaaaggcaggcacatctctgagttcgaggccaaggccagcctggttgatagagtgagttccaggacagccagagctacagagaaactgtctcaaaaagcaaaaacaaaacaaacaaacaaacaaacaaacaaacaatacagggtctgcctggcgtggtggtgcatgcctttaatcccagcactctggaggcagaggcaggcggatttctgagttccaggccagcctggtctacaaagtgagttccaggacagccagagctatacagagaaacccagtctcgaaacaaacaaacaaacaaacaaataaacaaacaaaaaacaaacaaacagggtccactggagagatggctcagtggttaagagcactgactgctcttccaaaggtcctgaattcaattcccagcaaccacatgttgactcacaaccatctctaatggggtctgatgccctcttctggtctgtctgaaaatagctacagtgtattcatacacaaaataaataaatcttaaaaaaacaaaaacaaaaacaaaaaacaaaaaacacggtctaactgcatagccttggcttccctgaaactctccatgtggaacaggccccttgaactcatcagagttcccgcctgtctctgcctttcaggtgctgaaattctatgtgcaccccacacctggctactgtttaactctgcccttttattgattgattgattgattgattggttgatttataagacaaggtctctcaggttggtctctaactcacagagctcttcctgcccctgccttcctaatgctgtgccaccatgcctggcttatttttttttatttcttatttagtcattttgcatttttgagacagattctcacataggccaggctaccctggagcttgctatgtagctgaggctgggctcgcacttttcatcctcctgcctcttcttctcaagtgctgggatgacagatgtgcaccagctccttcaggcatgactatcctgtctgcgctgtttgttctgagataggttcttaaaatgtagcccaggctggtatggaacttgatatgtagaccaggctggccttgaactcacagagatttgcctgcctctgtctcccacagtactgggattaaaggtctgtgccaccatgcccggcattattattaagttgtgtttcaaagcgtgcttctgtgaagggtttctcctaggtgacccataggaaggtccaccacaggccggttgagctctggtgcctcctattggcaaaccctaacaggaagctggccgccagggattctgggagatgtagtttatcgttgcatcctgtggcccagaggagactagcggatctgaagctgggagccaatagctctgagcaggccattagggacattttactctggatctaacaagtccctatgctgctacccagttgcatggatctggacacacagctgcccactaacattactccacacacgggcacttttgagtttgtgcctggacaattttgcccatccaagctatatggacttgcagatgtctccttgctggaccagggactttgactgtgacagtggactcactgtcttggcttgcaggtgatccagacacagagcacaggtagtgcaagggtcctgtggtggtaggtggctttgggtagaggtgcccttgttcctcactcagccttagttctcacacatgagcgtaacaacgttaagagtgattcttgctggatttctgtctgagcgttgggcacccagctttgtgcggcgcttgaaaacaaatgcaagctctccaggtccgattccaacttgtcctccttagggaagacgtccaccattgctaggaggacaattacaggctgggctcagctctggggtttacttttcttagggacggaagaaaagagggccccactctttgaattccacgtagttcagacctcgaatcgcctctccgggataggctgctatgttcacggcagccgccaggtggcgacagagacgcgcccatcgactcaggctgggcggggctgtacctgcctatgcggagaactgcaggggagacgcccacagacccatttaggaggaagaattctgagttctaaaaggcaaaatatcccaggcctggttgtgaaggcctttaatcctaaggcttaggaggccgaggcaggccgatctctatgagtttgaggccagcctggtctgcctagtaagttccaagacagccagggctatgtaggtatgtaaagagattctgtctagatgacctgagtttaatccttggtatgcacacgaaaaactggattcagggccatgcatctgtaaccccagaactcctatagcaagacgagagaatgagacaggagaatctccaggaaactggctcgctggccagctagcctagataggggaagagtagcagcagagaagagatacaggaaatgttcctgtgctgggtgtgtacactggcgatgtggcacaagcctgtgacacaggcttataggaggcaggggccagcagtctctatggggcgccaggagtccagcttttcttttcttttctttttttttttttttttggtttttcgagacaggggttctctatgtagccctggctgtcctggaactcactttgtagaccaggctggcctcgaactcagaaattcgcctgcctctgcctcctgaggctgggattaaaggcgtgcaccaccacgcctggctttttaaaaagatttatttattgttatatgtaattacactgtagctgtcttcaaacataccagaagagagcatcagatcccattacagatggttgtgagccaccatatggtcgctgggaattgaactcaggaccttcggaaaaacagtcaatgctcttaaccactgagccatctctccagctcgagtccagctgaacacctaaatcaagcccccatgttatatgtgtgtgtgtgtgatcatatatcatatagcctaggctacccctcaaactctgtaagaaggcgaagatgaccctgaactcctgtcacttgcttctaccttctgaatattggaagtaaaggcctgtcttgcttggcctttacttgctattgttgtgacagggcctctctgtgtagtccttgctgtcctagagctccctatgtagactaggctaaccttgaacttacagagatcaacctctcattgcctaccgagggctgggattataggtatgttacaggctggcctcagacccgtatcatgccttctccctcagcctcccctttttttatttttcccaaagatttatttatttgtatttatatgagtacactgtagctatctttcagacacacaccagaagcatacattggatctcatcacagatagttgtgagccaccatgtggttgctgggaattgaactcaggacctctggaagagcagtcagtgcccttaaccattgagccatctctccagcccctccctcagcctcctaaggacagggaccacacacttttcagctgattcagaccccacccgcatggattttacctccaaatgtatcccaagacaccaactccgttttccctgctttggtttaagagactctgggtttactcgagtgctgtgtgatttcacaaaagttcgcagcttctctgggctcccacgcaccacgtaggcacagagaagggactgtggctgcttcgacttgtaggagttggaaaatcttgctttcctggatctcactggatttagaaaaccaaaatttgcagaagcctttcgcctctgtccgggtcagaagcagccgattctgatctgctgaattctcagcgccctctgcaatgggagaccaagggtggaggtagacaccacacacaactggggccaggggtcagagagaaactccctggtctgcaggcatcttcttcccagaactctgaaacaaaccagtttcccctgcaagctccgcccacgctcctgacctcagagtccggaactctccagattggtccatctctagtcgttcctaaccacaactaacacaaagaaattggcaagctttgccacacccacttcgccaggccacgcccacgagaatactggcttccaccaccacatctggcttaggagacagatgtgggacattgaacccaggttcttgggcctgcgagcaagcattccactgactgagctccagtcccaactgtttgtttttctgttcttggggtatctataacccatactggcatggtataactcatggtaatctttctgcctccacctcttaaatgcttggattagagtgggtgtccctgcaacagtttgattatgttattagacttggtctacagggaggcctgaagccagctcctacagtgtgtgtgtgtgtgtgtgtgtgtgtgtgtgtgtgcgcgcgcgcgtgtgtgcccacgcggcgcacgcgcacacacgaacacacacacacacacacacacacatagatacaaggacgcaggccagagaagtacacccactgagcctggagctaggttggtagccagctggtcctagagttctcctgtctccacagcaaccgtggttacagatcctgacttccctcatggatgctggggatttgaactcagttcctcatgcctgtgtttcaagtatcttacccactgaaacatctccccagcttctcctgtgtcctaatgacatgtcatatggcttttcttttcacagcttgcctatttgagacgatattttccttttttttttttttttttgtttttttgttttttgagacagggtttctctgtataaccctggcttgtcctggagctcactttgtagaccaggctggcctcgaactcagaaatctgcctgcctctgcctcccaagtgctgggattaaaggcgtgcgccaccaccgcctggcgagacgataatttctaaaggtacaaacaaaaatttggagtctggtcgtggctggtcatagctgaaataatcctggcacttgagaggaggggaagggtcagggtttggcggtgtgaggcagtgtccaataaaggaaagcagaggggacctccatgatggctcagcaggcaaaggggcgcgctgccaggcctgccaacctcagtttgactcccgaaccctcagaatggagagaactgattctcgaaaaatgttcactgatctctacatacgttaccaaggtgcacacacacacacacacacacacacacacacacgactaattgaagcagaacaggatagcaaatcaaagacagagcttggtggtgctgcatgtcttcaatcccagattcagaggcaggctgagctttgaaagttggaggctagcctggtctacagagggagttacaggatagtcaaggcttcaaacttaaaatgtaactgacaatggccttgaactcttgtttctccagcctcagttctggactacaagtactgggattacaacacaaagaaactttgtctcaaaaacacaaaaacaacaaccctccctgcccttccaaaaatccatgagcaaacaaacgaaatgaaggcaggagcctcctgtttgaggctaagctccctcaatgagtcacaacccaagagaataaaagtcaaaaactcaagtggccatgctgaatttcaagtgacccagggaaaagaactcacctgttgtctgatcttcggagaaactcatagatgaatatataacaaccccgctttccagtcaggccagtttaaatcatcaggtattgaagttctttgctttaattataaccaaaaagtgttaccataagacacctgggtatcaatctcttgagtgtccttagttttcgactcccaaggtccctctttctctaaagccagcccctccctaatgcagcaggacagcctacccttagtagatctttaagttaaaaaaaaaggtgaagatttatatatttgtttgttcgcctgcccatccatctacccatccatccatccatccatccatccatccatccatccatccatccatccatctatgagttttactacctgtgtactgtatgcatgtacatctgcttaccagaagagggcatcagatcctaatgtagatggttgtgagccaccatgtgggtcctgggaactaaacgaggtctccagaagggcagccagtgttcttaacctctgagtcatctctccaggccctgttaagtgaaacttactgtaagttttccttcctgctgccttgtctctctccatttgcttctttctttctttactttgtggtgctggaatccctaggccatactgacttttttactttttaaaaactcaggagtggtagcgcatgcctttaatcccagcactcgagaggcagagacaggaggatttctgagtttgaggccagtctggtctacaaagtgagttccaggacagccaggtctatacagagaaaccctgtctcgaaaaaacaaacaaacaaacaacctcaggagtggagagatggcccagcagctaagagcatccgttgcacttgcagaggacccaagttcagttcctagcaccctacacaggtgttcataaccacctgtaactccagctcccggggatctgacgccctcttctggcctcctcaggcaactgcatgcatgaaccaccccaagacacacacatacatttaaagataaagtaaatcctttaaaaaattcattcattcattcattcattcatccattcatccattcatccattcatccattcatccattcatccattcatccattcatccattcatccattcatccattcatccagagacagggcctcatatatcccagactggcttcaaactcaatacacatccaggctggccttgaactctttcccctgcctccactcctgagtgttggggttgcaggcatggaacagcatgtcttatgacttctagtttttaaaatttgtttgtttttattttttgacacagggtctccctatgtagtcttggctgtcctggaatttgctatgtagaccaggctggccttgaactcacagagacccccctgcctctgctttctgagtgcttgaattaaaagaatgtgccaacaaacccaggttgttagttttgtttgtttatttgagaatcctaaactatctctagaaaggaaaaggtgggtctgggaggtggctcagtgggtaacttttatgtgtgtttgtgtgtggccacatgagttggagagacagctcaacagttaagagtgcttggtgtgggctggtgagatggctcagtgggtaagagcacccgactgctcttccgaaggtccagagttcaaatcccagcaaccacatggtggctcacaaccatctgtaacaagatctgactccctcttctggagtgtctgaagacagctacagtgtacttacatataataaataaataaaccttaaaaaaaaaaaaaaaaaagagtgcttggtgcttcccagaagacctgaggtcagttcccagccagcatcttcattgggtggtgcacaactgcctgtaaccccaattccaggggacctcacaccatctcctggtctccataggtaccacatacatgtggcacacacacttacacacacacacacacagaggcaccacatacaggtgacatacactcacatacacactcacacgcacactcacacatactcacacacaagtaccacatacatgtggcacacactcacataatatacatacacacacactcacacacgcatgtatacacataaataagaaattaaaaataatttgaaaattaaaattattttgtaaaacagtaaaaaggctgtgggtgtggctcagtggtggagcacctgcctatttagaagccctgacaaaacagaaaacaattttaggttccagataatttcaggctgtcttgaaacttgctctgtagaccagggtggtcatggactcccaagtgctgggattaaggacatgtgccaccactgcctggcttctttcttccttccctccccttccctcccctcccctcccctctcctcccctcttcctcctcccctcttcttttcttttcttttcttttcttttcttttcttttcttttcttttcttttcttttcttctcttctcttctcttctcttctcttctcttcttttcttttcttttctttccctctgttatttgagacagattttcctgtagcccaggttggcctcaaacagaccccaggtttgttattaactctggatccccatgtctgtccctcttcctaatgctgggatagcactgtgtatccttgggtctggtttatcagggtggtggggatggaacccagggcctccagaccgctagcccagcactttgctgcctgagccacatcgcagtccagatcccccttcttttgtgctcacaggattccgcagacctctcacttatccccagggaacaacacatctacccctgcaggaaaccatggtgacttaggatctgggaggattagaaagggctgggcctgggaccctgcaaactggctagtgctgatggggtggggtggggtgggggtggggacgggacttgttctctcttgcagataataggctaaacctatgatcagaggtaaaagcccactccaggcacagtcctggtgtggttctgccctctgttgaagggatggcttctggtttttatacccccttaccttgcacttgactcatgatagagaagggcaagtgcctttgccagggtcactggcctgggatgatggctgtgaagttggagaccctgccatagctggcgcaccccacctggctctgggatccaccattgctcgaagataactgctttcagccacacgtggtggcacaagtctctgatttcaagactaaggaagctaagaaggcaggactgtaagtctgaggactgcctcggcctaaagagcaaggtgctgaaagagtgaaataagaagaaataagaaaggggaggagggggaggcagaggcaggcagatttctgagtttgaggccagtctggtctacagggtgagttccaggacagccagggctatacagagaaaccctgtcttgaagagagagagagagagagagagagagagagagagagagggaggagaggagagaggagagaaggaggagggactaagtaagagggaagaaggacgaaggtgggagtagggaggaagaaagggagggagggacggacagatgtctctgaagtccctctatatgccaggcaagtgctttacgaatgagatattccccaagtaagcttttttaaaaaatagattaatttatttactttgtgcatataagtacagtacatagtagctgtcttcagacacaccagaagagggcatcacatcccattacagatggtagtgagccaccacgaggttgagattgaactcaggacctctggaagagcagtcagtgctcttaaccgctgagccatctctccagccctttaacacaaaagttttcttttaatttaatttaattattttaaaattatgtatgcattgtgtgtctgcgcataggttcacccatgagtgcattgcctgtggaagccagaagctgtcattggaggtggagatggaattatgggtggggtgagccaactgatgcagggaattaaacccaagttctctggaagaacaggaaatgctcttaaccactgagccatctttccaaagactttgtgttttaattatgtgtatctgtgtattgatgggtatgtggatgtgaatgcaggtgcccttggtggctgaagagggtgctgtagtcccttgagctggtgttttaggtggttgtgaggggcctacatcgggtgctgagaactgaactcatgtcctttgcaagaacattgagcactttttttttttggtttttttttttttttttttttttttttttgagacaggtttctctatatagccctggttgtcctggaactcactctgtagaccagactggcctcgaactcaggaatccgcctgtctctgcctcccgagtgctgggattaaaggtgtgcgccaccacgtccggccactcattgagcacttttaacctccgagccatctgtccagccccttaagttgtttgaaagtctcattccactctaagtcacagcctttctgccaggaggaagggttctgtgcctattggtctctactgctgcgtatggggcctccaaaaagagattttgggagatggaggaaatcagaacccattgtttagcatctggggctggagaaatggctcaggagttaaaagcattggccgtgacgggcatggtggcgcacgcctttaatcctagtactctggaggcagaggcaggcagatttctgagttcggggccagcctggcctacaaaatgagttccaggacagccagggctatacagagaaaccctgtctccaaaaaaaaaaaaaaaaaaacccccccaaaaaaaaaaactaaaaaaccaaaaaaaaaaaaaaaaaaaaaaaaaaccaaaaaaaaaaaaaaaaccaaaaaacaaaaaaaaaaaaaccaaaaccaaaaacaaaaacaaaaaaaaacaaaaaaaaaaaaacaaacccaaaagagcactggccgtgttccatccagggctcacaacggtctctaactccacatcccaggaatctgatgccctcttctgacctccatgggcagcaggtacacatgtggtacacaaacaaaattgcaagtaccgcaccacacacacagaataaatcactgctatttctcctccctcctccccatgcctccttccttccttgaggacacccccccccccttctcagagtgccctccccgacctgaagcctgtctcctccaaagatctgaggatctcattaagagagaaccagggctcaggcttcaggtctttccggtgaagaggccttcctttccaaacctccctggatgtgaagggaaacagctggggactgcagggcagccaagaaaacaacacaactgcttccaggcctgccctgcccggatttcctgaggctgagctagctctgcagcaggaggtctggctgcttgctccacatccctggcttgctgggtaccctcaggcaagactcttgccctctctgagccatgggcgggagcaaggcttgagagttagatggcctgggaggtatcactcacccagtgcaggtgagtcatacagaggtcgccactggctacaggtccaccagttacctggttggtggtagtggtggtaggcttgtatggttgggggtggtgggggtggtgtgtggtgtgtgtgtgtgtgtgtgtgtgtgtgtgtgtgtgtatggtgtgtatgtgtatgtgtgtgtgtggtgggtatgtgtatgtgtgtgtgtggtgggtatgtgtatgtgtgtgtgtggtgtgtatgtgtgtatatgtgtatgtgtggtgtatgtgtgtgtgtggtgtgtatgtgtgtgtgtggtatgtatgtgtgtggtatgtatgtgtgtgtgtggtatgtgtgtgaatgctggtgtctgtggaacctggatgctttgtatgaccttggagctggagttataagcaagggctatggtgactaggaaccaaactcaggtcctctgcaacatcagtaagcacttgcaactgctgagccacctctccagtcctgctctccctttttatagacagtctccttacgtagcccaggctggacaggaactcatgagatcctcctgcctctgcctccctatattaccatgcctgactagctgcatgtattttgtatgtgatgtgtgtgtgtgtgggtgcatgtgcgcacgtgtggtccacgtatctgagtgtatgggtacataggtgtgcccatgcatgtgcaataagaggccagagaaggatactaagtctctctctctctctgttgctctctgccttgttgccatgagacagggtctcttgcagggctttggtggcacttgcctttaatcccagcactgcgggtggaggccgaggcactctgggggccaaggcaggcagagctctatgagttcgaggccaccatgagtaggttctagaatggccaaggctacacaggaaaaaaaaatctgtcttaaaagtgaatgagtgagaatgagtgggagagagagagagagagagagagagagagagtctcactgagccacagccattggtttaggatttagctaggttggctggccagcaagttctcaggacccccttgtcaccgtcctccaatgctgggtgccaggcacacacagacacacttggctttttacacaagagctagaaactcaaactcaatgcttcctgtttgcatctatctcctcagcatctgtgtgtgcatactggaggtaggatcttgctctgtagcctaggctagctgcaaactcatggtcctcctgcttcagtctgctgaggcctggaattacaccacacctgggtgtttttaatcaatcagtatacacactggggctggaaaaatggctcaactgttaagagcatttgttgctctttcaggggacctagttcagttcccaccacccacttggcagctcatagccattcatagtaacaccagttctaagacgcccaacgccatcttctgcctcccttacgtaccaggctggcccatgtgtgcatgcataaatgcaagcaaaacactcgttcacataacataaataaacctaaagccaggcagtggtggcagacacctttaatctcagcactcaggaggagatctctgtgagtctgaggccagcttggtctacagagtgagttttaggatagccaaggctacacacacacacaccctgtcttgaaaaaaaaacccaaaaatttaaataataaaccaataaatctagacatatgttaaagtcattttaaagataaaacaacaacaacaacaacaaaaaaaatacaagcacgcaggatccccagaacttatatcaaatgccaggtgggtgtggtggcccatttataagtccagcactcagaaggtgagacaacagatccccggagcgagctggctagctagactagcccggttggtgagctccaggctcagcaaagagtctctgctcagtaaatagagagtaattacacaggacatgcagtgtccacctttgacctacacacattgggaaggcagagaccagcggacctctgggacttagactcaccggccggctagacttctctatttggaaagttccatacctgacagatgacactgtggtcttcctctgacctctgcatgcaaatgtgcacactcacacagaaagagagcaaagttaagggctgggggagcaactcagtgggcggcatgcttgggtgtggcaccacacacctggggtcctaggttcacctcagctacatagtgtgtttaaggccaattcacgacactaaagaccttctctgtctcaaaaaaggagtcaggcatgaccgcacatgtttgtaattccagcaatttcagaagcctcatcaagaggttagaaagttcaaggctaacctgggctactttgagtgaccctgtttccaaaagtagctaagggtactgaggcaggaggatcattttgagtttgaggccggtctgggtttagtatgagactctgactccaaaaccctgggtgagtgagattactcagtaggtcaaagcagatgtcacacaagcctgacgacctggattccatccctgggagccaggaagaaaaagctgaattccatggtgtgcagctgaagtcattttccgtgagatgggaagtggaggcaggagagccgcaaagaaggtctgacgtctcctggctggtttgaaggattcaaagtgtgtgtgtgtgtgtgtgtgtgtgtgtgtgtgtatacatgtagaagggaaaactgactctttgaaaattgtcctgtacttgagtactgtgggatatactcaggcacacacagacacacacagacacacacatatacagacacacatacacacttacacacatagacacacagacacatacatatacacacagacacacatacatacacaggtacacacaagcacacacacacacacacagattgagattaaaattaagaatttttgggttctttttttgaaacagggtttctctgtgtagccctggctgtcctggaatttgttctagaccaggctggccacgaattcagaaatcagcctgtctctgcctcccaagtgccgagatccaaggtgtgcgccaccaccacccagcaagactgtgatgaaaagaacatatcagggctggagagatagctcagtgggtaagagcactgactgctctttcgaaggtcctgagttcaaatcccagcaaccacatggtggatcacaaccatctgtattgagatccgacaccctcttctggtgtctgaagacagctacagtatatataaaataaacttaaaaaaaaaaaaaagaaaagaaaagaacatatcaagccaacattactgccaagcagtaaatacctacaacgaaagccaaagggatggacttggcgagatctgtatgaaatccgagtctgagttaattttctctaatgcaacccaatgtcagactgaggcctttgctcactggctaggccaggacgaggcagcctcacccgttctgaggttaaggagctctgctgtgtttgctgtagtatgagggcgatggacaaaagggatatctcacgcagcattttgtgagagggatgtgctagtgcccatctgtaatcctaacactcgggaggtgaaggcaggaggactaaattcaaggctagcctcggatccagagtaagtttgacagcctgggctacatgagaccttgtctcaaaagccaatacataaataaatacagctgccaggcggtggtggtgcacgcctttaatcccagcactcgggaggcaggggcaggcggatttctgagttcgaggccagcctggtctacaaagtgagttccaggacagccagggctatacagagaaaccctgtctcgaaaaacaaacaaacaaacaaacaaacaaacaaaaatacagactttgaaggggcctcatttaggagtcagggaggtgtgatgtctggagaccaggaagccaccttaggatcttaaagctatttgttaaggacaccaaacacagggtggtggaaaatactctagggtcctttcccgggtacattctagttacccaacccagggaatcccctatttggggcctttcttgtttctcatcacaattccttgtcttccggtttagccaccagaattggactttcctgtgtctccaatttcagctctggagacagaaaggggagttcccatagccggccagagaagctgacagggcagaccctagccagccgaatctgctctttcctgtaaattagataaaaaacacctcccgggtgttgaggctgtcaggctagactctgattctgacttccagccactgcacatggagccttgaggagggacacggagggtgggtttcaggtctcccagagctgcagttactggcgtggatgctgggagccaaggttgctgcctctgaaacaacctcaagcactcttttttttttctttcctttcttgagacagggtttcttcgagtagccttggctgtcctggaactccctctgtagacaagctgttcttatactccttctgtagacctggctggcctcgaaccaagagatccgcttgcctctgcctcccaagtgctgggattaaaggcgtgtgccatcactacacagcttgtaagtgctcttaagctgatctgagttgtctctttagcctctcaaactcttggtaattctcctgcttcggcacgctggggactgggactacacctgtgtgccaccatggctggctatttctctctcttgaacactggaagagtgctcagagtttactggatctgggagaagctcgagactgggttatggaagccggctctgcttgctccagctcagggaggagttgcctgagggccaggcacttcgaaggacagatgggacccaaggccagacactgggccccagctcaccagaagtggagccctgactgtctctgagagggtaagctggggtggctgccaggcgggcaaggccaaagcctggcagcagccggtggcccctcttctggcagagatatcttggcatgagcctggctctgcccatgacactaaagtgccctcttaattagccaggctcttgccaagcactggccacgattgccttgtttcacagaattcaccttggactggcacagatggggagggtggatagcccggtgttttgtctttcttctaggggagctgggctcaagggcaggactcctgggccagcccaggtttttccctcagaaaccacagcatgaatactggcatgatggagcacacctgtaatcagcagaaattgagacaggaagattgttgagaatttgaggccaacctaggctaaatagggagaccctatctctacacactccccctccccccgcccctggaaatgctggagggtctggggaagatggctcagtggttaagggcacttgctgctcttgcaggggacccaagtttgattcccagcatctataacttggtggctcacaattccagttccaggcactctgacaccttcctgtggtctgcaaggcacctgcattcattctcacgtgcatgcgcacacacatgcgcgcgcgcacacacacacacacacacacacacacatctcataaatacaaataaaataaatcttgaaaacaacagtgacaacaacacatgctgaacatggtggtgctcctgacatggtggtgctcctgacatggtggtgctcctgacatggtgatgctcctgacatggtggtgctcctgacatgatggtaagcctgacatggtggtaagcctgacatggtggtgctcctgacatggtggtgctcctgacatggtggtgctcctgacatggtggtaagcctgacatggtggtaagcctgacatggtggtgctcctgacatggtggtgctccctgcactgacagttctgaggaggtggagataggaggatccagacttggaagcttgcctgagatagaccctgtctcagaataggctggaggctgcctctgcccttttgcttctatctctttttccatatgtgtgtgtgcgtgtgtgcatatgtgtatgcatatttgtaagtatatgtatataaataaacacacacacacacaaacttactctgtatactaggctggccttgaactcagagacctgcctgtttctgccttcccagtgctgggattaaaagcgtgtgccatgggctggtgagatggctcagtgggtaagagtacctgactgctcttccaaaggtccagtgttcaagtcccagcaaccacatggtggctcacaaccatccgtaacaagatctgacgccctcttctggtgtgtctgaagacagctacagtgtacttaaataaataaatcttaaaaaaaaaaaaaaaaaaaaaggcgtgcgccaccactgcccggctagttagctttatcttccgtggatgttttgtctgcagtatgtctgagtgagggtgtcagatcctctgtaactggagttatagacagttgtgagcagccatgtaagtgctgggaattgaatccgggttctctggaagagcagttcatgctcttaagcactgcgccatctctccagctgtccttatttatttttaagggtctcttgtagccatacaggccagaaacccaccattagccacggaccttgagctccaagtgctgggtgacaggcccgcatctctcctggtttgtgatctgctagggatggggtctaggacctcacacaggctgcataagcattcccctcacccaccctcatccccacccagtcctggacaggctctggctgtgtaggctggtctcctcctttctatccccctgcctcagcctcctgagtgctgaggtgaaggtgtgtgctacctacctagctggattctcctggtgacacggcctcatggctctaattggaacccctgggaaggtttggagcctactttggtgggggcagggggcgggcgggggtggagtgaggagggggggtggggctcattttaagacccaggcagagggtcacactttgtccattcaattctgctatctggaaagtcagctgtggtggctcccgagtgctgtcatcccagcactggggaggttgaagcaggaaggagaatcacaggttcaaggccagcttggtttacttgagactctgtctcaaaaagaccaaaccaggactgggaggatggccagtaaaatgcttttccagctatcgagggaacctgagtttcatcctggaactcatacaaaaagctggctgtggtcaggtggcgcatgcctttaatcccatcactcaggagacagaggcaggcagattcttgagttcgaggccagcctggtctacagactgagttccaggatagccaggtctacacagagaaaccctatcttggaaaacaaaacaaacaaaaaaaactaggtgtggctagcctgtaaccccagtgctgggtaaacaggggcaggtgaatacatctccgggattcgccagcctgtcctatctatgagctctaggtctggggagacagcctgtcaaatcaatgcaagcaggtgacaaccgaggaaagacacccaaggttgatgcacgggcaagtgtgcacacacacacaccacagcaaacaaaaactaacaaaacccaaaccatattttgctgtggtggtggttgttaaattttatttattctgtgtgtatgggtatttcacctgcatgaatatctacctgtgtagcatatacatgccgggtactttcggaggtcagaagaggacatcaaatcccgtagaactggagttacagaaaatgaacttgtggcttctgggaatctaacttggatcctctaaaggacaggcaggactctgaattcttgagccacagatacagctttccaaacccatgttttgtaagagccaccaggcctgaaaactctgggccatgtcccgtttgttgtgtctaggcctcagtttcctggaaggcagagaatgcgtaggtccgttgttagtggagacagcagtggtggtaacagcctggtctaccctcttggtcagagggaggcaggcggagagtaactcagggcctgggggcaacacccagctgggcctggggctagtgggggctcagccaggcaggacgtgggtcctcctacttcctaagctctgatgggcaagtggtgccagtggtaccaggctgccctgaggggcccttagagcaggtgaccacagagccacaaagaggctattcatggcctccggttcacgaggctgcccctttattgagggcttgaaccacagaaagctgtgtggtctgcagggaagctagttctgagctgtctggccagctacagtagtgtgtgtgtgtgtgtgtgtgtgtatacacatggtacttttttctatctatctatctatctatctatctatctatctatctatctatctatctttgtgtctatgtatctaataataaattgatctatttaactatgtagatatcaatccattgatctatgtatctatcaactgatgtgtatgtatgtatggatgtacctacatgcgtacttgaggcaggacttaaagtagcccaggctagccttaccacatttcatagcagaggatggtcttgaacttcaggtcctcctgtctctacctcgtgagtgctgggattacaggtttgtgccaccacgcctggcttaggaggttctgtggttagaatccaggatttcactatcaactgggccacatcgtcagccatattcaatatgctttcttttacattcttacttatttactacaaatgggtcccaggaaccaaggtcggcaagcctgatggtgagtgctcttccctgctggctgacttatttgctcttttttttttttttttttttttctagacagggtttctctgtgtagccctggctgtcctggaactcactttgtagaccaggctggcctcgaactcagaaatctgcctgcctctgtccccaaccccacccccagtactgggattaaaggcatgtgccacacgcccagctcttatttgctcctttgaattaaggtctcatgtacacaaggctgaccgttcatgcacaatacagctaaggcttgctttgaatttctcagtttctttcttctacccaacagtttctgagatttcaggtccgtcctatgtcatgcccaggttttttgtttgtttgtttgtttgttttttggttttgttttgctgtttttcaacacagagtttctctgtggaaccctggctatcctggaactctgtataccaggctgtccttgaactcagagaccctctgcctccctagtgctgggttaaaggtccctgccatcaccgtgaaacttaagcccagcttctcatttggtggctggaaatttgcctgcttctgcctctctccagctgcctagcactgatgtctggttgagagcaggggaaactgaggtgccgctaggacaagatctcatgcaaccgtgaacagccctactgagccatcctcctgggacagcctctcaggccaggccttctgtgtcttctgctatagtagcagtacaaagttgacacaaccttgctcttcccagcagctgggagttcctgagaagtgtaaatgaggtttccaggaaagccaagaggtgagagactgaaaagttggagggataagggggtgcccatcaagctgcagtggagacttgttatctgttgcgcatccctgacatctcagcaggaggatcaggagttcaagggcatcctcagcaacatagtaagtctatggagctagcctgggctacacagatgccattacaaaaaaaaaaaaaaaagtaaaaaaaaaatcttgggatatgggggatgggtgggtgaactgtgtagcccagggagtcactactggttcctttggaagtccctgttctgcatggagatcatggagattctggggacactccaggagtcctccttcagggaactaagttggggagcagggcagcctatcctgtggccttatttcctgtctggtgcaagcgccaggcaaggcatccagccaggagcgactcaggcctgacctccgctaactgttctgttttgtgctgcaccctcatctcagcagggatcaggtggcacttgggtccccaggggatccagggacacagtgtccatgtccccatctttccccacagggacctggggcagggccgaagaggagacctcgtgatgtgtacaggtgtagctcatccctccgaggactcaggggacacttggggaaggtgtgacacagagcaggctggagctctgtgcggctctttattaagtgtgcctacaacaggggcagagacacagcagcgacaatgataacagcccactcccaaccgaagctcaatggttaccagactcagccaactgcagaattccagtccataacggcacctcctttcctttctcaggagcttaccagagaggtctcaccccaagccttcaccccatctagagcaaatgcttatatcccccatgtttgctcagagcagagcatggagggaccttcctgtcaccagaggcagaggcattctgtatacgtgcatacacgcctctgtgtgtgtgtgtgtgtgtgtgtgtgtgtatttggtacagatctaagcatagaaaattgaaaagcattgaggttggtgattgaaaggctcactgatgggcaagtcgggttcgagtgcgctaactgtatgactctatggatccgaatatcatgctgttttggaaaggaatgagggagctactgtttctaaggaagagaagaatgggcaccaagacatagggagggaaggtgggacagtaagcacttacagccgaagcccaagacctggaacccaaggggaaaaacaggtgtggccaggcttggtggcacgcgcctttagtctctgagttcaagtccagccaggattacatagcaaaactttccctcaagaaaaaaaggtaggggctggagagatggctcagtggttaagagcactgactgctcttccgaaggtcccgagttcaaatcccagcaaccacatggtggctcacaaccatctataatgagatctgacgctctcttctggagtgtctggagacagctacagtgtacttacatatagtaaataaataaatcttaaaaaaaaaaaaaagaaaaaaggtagaggaggaagaggaggaggagaaggcaagacaaaacaactaactacatagctgggggaggtggtgcttgcctataatcccagcacttggaaggctgaaagaggaaatcaggagttcctatgcagctttggcttatgtgagcctttctcataaaaccaagagcaaaacagcaaaacatgaggtggtaactcagctggagagtgcttgtctagattccctcagtgaggggctggggtgtgactcagtgcctagaatcccccagtgaggggctgggggcgtggctcagtggtagagcccctgcctagaatcccccagggaggggctgggacgtggctcagtggtagagcccctgcctagaatcccccattgacgggctggggtgtggctcagtaacagactgctcacctaagatgttcaaggccatgactttcattgaaaacatcacaaaacaaacaaaaccatcagtgaggttgaatgtgtatccatgtttgcttgtctccatttaaagaacacctggaagatctctagctgctggtggaggcgggagggtgaaggctgcttcatcctttgtatttgaactgtgtggctgtgggtgtattatctgttcccaaggactgcacatgaaatgagaacaatgaaggcttcggttctgctgagatgaacctcaattctccacagatgatctcacccagagccagatggaagtcccccaacatttaagcctctgttctgagtgctggacccaaactcatcttaagggaaaacccaaagagcctttctgtggtttccttccacaactgtctttcaatgtgtgtatgtgtgcacgtgtgtttgcttgtgtgtgtgtgtgtgtactatgtgcatgtgtgtgagcatgtgtgtatatgtatgtgcatgagtgtgtgtgtgtgtgtgtatacatgtgagcatgtatgtataggccagaggttagtgatgggtaactttctccagagctctccaccttagttttattgtctgtgtgtgagcggctgtgggcactgtacaccacagcacatgtgtggaggtcagagaacaacttgtggctgtcacttctctccctctgtgtgggtctaagacctggatccagcgctttcgcttgcttgagacatctcgttgactagctcctccgttgttaacacagggtctcactatgtaggtccagttatcttggaatttgctctgtagaccaggccggcatcaaactcagagatagacctgcctttgccttcagagtactgggattaaaggtgtgcaccactaccacccagtttaaaattctaaaaagatttgtgggtgcagggatttgaggaggccaggagagactgttggatctctgggaactggagttagaggtggttgtgagcccccacgggtgctgagaactgaactagggtgcttgagaggagctcgctcactgctgagccccaccttagatttgagtccctcgtactgaagctgagttcagtgatttgactgagccgaccgctcagggtgggcttttcgatgtgcaccacaggcctggctttataggtgaggtcatgcttgcacaactggcctttcttttgcatttacgtgtgtgtgtgtgtgtgtgtgtacatgaagtgagagggggcagtatgggaagggtcagtggacaacttaagggagttggttttgccttccatcatgatggtctagagactaaattcagcccctcagcccgggagcgtgcctttaccctccgagctcccagctttgggtttttgaggcaaggtttcatatagcttaggctggcctggcattcaaggtcatctcagaggcctaggatgaccttgtgttgtcggttctccggcctttacctctggtgtgctggcgtttgccttaccacacccaggcatcccccatagcttaagcctaaagctctcggatggccagcacgcccatgccctgacgtgaagttcagtgactaatcaatacagagcgttcacggagccctgacacatagcagcattgacttaaccttaacagcctggtgtgtaatgaggccaacttgtccgattctgcccacgatgcgatgctctgggttaaacaggtttgaacagagtaccggatggcagagagggcaccctcagtatcgggttttggctgttactgcttccagtcttctgacctgctccctcaaggctggtcttaaactcaaagcaatcctcctgtccctgcttctcaagttctggaattacaagtgtgactcactgtacccaggaatatgtgtctttattacagaggaaggagagctcagagagtgagagtaacctgtgcaaagtcccacagcaggagaggatggctggctatcggccgcgaacttggtgacctttcctgtgacctctaagggaggaactagatgtcccagcaaggattctagggacttgtcaggactgacctttgatgatgggaaagccatgccatctccccttcccctttgatggtcgctggaggggtttgcctgggacagagatgcgtttggacacagatcaccgtgaagactggtcagtttcagtaccctgcccagcctgtggctgggaagggccaggggcccagatcttgtgggcagcctggggtagggccagcattccaggggcctgcctggcatgtggggaatgtcccaggagaagtctcagtcctccagaaactcaaagggaagtgttcttacgtggggtggtgtgtggtgggaggtgggaggtggtgtttgtgggaatgtccctctggtctggaaccctgaggggctgcagttaggaggtacattggggctgtgccattctagggagctgacctgcttttctgatgtcttcataaacagagaccactattcctgccttacctaccctgcttcctggtagaccagcaccccggggcttgagcatcaccacagtagggacttttgtgggccactgacttgggccacagttaccacaatttatttagagtcagcaaggtggctgtactctatgctgacccgggaatagaaatctcggtttctgctcaggaggcccaggctacaaggccttgaaaaaccctgaggcgggcggggcaggtagggctctgcatgcgcctctctagaaattaacctcctttctaccccagacccttctggcgtctctggcttcttcaaggaccggctctaaggctacttcctggtacaccctggaccctccctccatcctgaagggatcattatcttaaacctggtccttcccatcgactgggtttgggggtaggggtgtttcaggatggcctcagagagcaggagaaagttggagatcagccaactactgcagagcacgactgtggaggaacagttaaatggactagcaaacacgaacgggccagaggcagaaggactgctatgagttcgagtccagcctgagccacacagatacttcaagcctagtctgagttacagagtgaaacccggtcttaaaccccagaaaaacactccggggaagcgcaggggaccgggcgcgcgctgcagagccccctccccggcaggcccgggtaggggcgtggccacggtgacgtcatcctcctataaaaccctgggcgccgccgggctggctttgtggagaactgcagcgggctaagccgtgttgaacaaaggaggtcgggcacagctatccaagctcccggggccaccgggccgccctccgccaccatgaccgccaacggcacggcagaggctgtgcagattcagttcgggctcatcagctgcggcaacaagtacctgacagccgaggcgttcgggttcaaggtgaacgcatccgctagtagcttgaaaaagaagcagatctggacgctggagcaacctcccgatgaggcgggcagcgcggccgtgtgtctgcgcagccacctgggtcgctacctggccgccgacaaggacggcaacgtgacctgcgagcgcgaggtgcccgacggcgactgccgctttctcgtcgtggcgcacgacgacggccgctggtcgctgcagtccgaggctcaccggcgctactttggcggcaccgaggaccgcctgtcctgcttcgcgcagagcgtgtcgccggccgagaagtggagcgtgcacatcgccatgcacccgcaggttaacatctacagcgttacccgcaagcgctacgcgcatctgagcgcgcggccggccgacgagatcgcggtagaccgcgacgtgccttggggcgtcgactcgctcatcaccttggccttccaggaccaacgctacagtgtgcagacgtccgaccaccgcttcctgcgccacgacgggcgccttgtggcacggccggagcccgccacgggcttcacgctggagttccgctccggcaaggtggcctttcgcgactgcgaaggtcgctacctggctccgtccgggcccagcggcaccctcaaggctggcaaggccaccaaggtgggcaaagatgagctcttcgccctggaacagagctgcgctcaggtggtgctgcaggcggccaacgagaggaacgtgtccacgcgccagggtgagttggggacatgtcccctcccttgggtcctgacccagtgcacaaaagcatctctgcactccttctatttccctatttcctcctgggctccctttaggctcacaggcctctgggctccgccatgaggaggtgggcttctattttgaaagatctgatctcaccagatagccttggctatcctggaactcgctatgtagactgggctggccccgaactcgcagaaatcttccttcctgtctcttgtgctgggaataaaggcatgtaccacccctctgttcaggacgtaggcttcttctgctgggagaaggtgacgtggggaagtgggtaaggcctaacacattctaaagcaatactgtccaccaccaccccccccccccccggctgggggcgtgggactccatagacctagcttagatcttctccgtttcctcttccttcccagtctgagccatccccattcatgagccgattctttaggataggctgtcccaggtcttggagaggaagggttccccctacacccccccttgttcatttcctcgtgcgtcctctcccgtttcgcgggcctttggctggagggccaggggacagtcacccctgccctccccgccttaaatggcgagatagaggaggttggaggggcttttgatcccggcggggtgtgctgggcggggtcggccctgcgactcttggtggtggtggggttgtccgtaggggcttcccctcccccactccatctcccctcgctaaggcctggcgctccgggccgcggcctttgtgagcaggggggcgggtcgccacggctgggccctccctcgtcccctttgtcctgctaaggctctgcagatgggaaaaccagatgcggcggagctgggggaggggatcggcttaggcgggtccctctgcggaagagccacccccaaccctccaggcgttgtccctggtccagggttcattgagaaggcgcggagtgaagccgcctggctcttccttcgcaccccggctggcaggcggcgtggcgcgggtggctgcgcgccaggcgccctccctgccctcctatgcacgccttgcggtccggcactcggcggagtgtccctccaaaagcctctactctcgagtgaaccggtccccaaggcctctctggctgggaacaaccgtttgcagctctatttgtccccatccagggcctccagcaggctggcaggccatttccgaccggcatgggcatggtacaagtaggcgcctcctttctggcgtacccccgactcttcaaagggtctttgctgcctgctggtaggggcttgtgagatctcgcttccttggttgggaaactgaaccccaggctttggagatagctggatgggagccagtctgtggggaggaagacccccctcccccaatgcagagggcaaagccttgggtggggcctgcttgagtttggctgaataacgctcagaaaagtgcgaccatttgcttactgttacacagtaagtcagcaccatgctgaactgggtgtacttgatgccagaatgttctctcattatacacacacacacacacacacacacacacacacacacacaccaatgaaccatggcctctcttgtttcacagtgctgggcgagggggtcagagttcccacctgtttagcaaacattgagatacgagctgcggtaaacgtctcttgggaatgtgactggtatgtaaagcagaagattgggggtacaggatcggggtagtagattataaagatctggggtcccttctgaggacccaggagctgccccaggagagtgaatagaaatgagcatgcaccaagtttatggactggttttgcaggcaggggcctcagcaaaggcccggaggcagggagttgcaaatagagaagccctgcatagctaggaggaaggctgggattggagggaatcctgcagatgacgagtactccagagcctagagagaccagctctctgcttacagagctgtggccgaggcttgtgccctggggaaggttaggcaaggcacaggtgacttgggcccttggggcctgaaaggagctagagggtgtgttttgcgagcctggacaggtacccttttctgagggtgccatgattgtgcatgattcacactgatgcggcaggagggggcgggaattgaaggggtgagaatctgatgggaacttggggtcacacacagtcagacctcttctgccctcctatgtctgggtccaagtctcattcccaagtcagccaactcctcccccggctttttgagggtgagctgttgggtgggtgtgccggggaggccattttgggcaggcttgcgtggcagggaggcggggctgggcttcggggaaacacgtgttgaactgctagccaggagtagggagagggaaggctcaatctggtctggggttgtgaatcttccatgcagatttgctgcttccggcttcctggcctcagtttccccatctgaaagcacagaggtacattgagccaggatcttcctgggaggtggagatcctatgagagtaggatggggggtagtgggtagggtcttttcctccttgcttctcatgaccctcccaagcccctgctggctcaaggagaccccgtgctatgtctccccacactgcccaccctggcttacttgttgggttctaatgctttcaaagaattttgtccccatcatttctagggcggctggctaagaatgagtgacaggtgaggctgggctttgtagggtatccttttgacggcttccctcttgggtcgaggaatggcttagttttgagcactgtacgactttgggcggtgaagtcctggagggttctaaactaagccgccttctgggttgtgaggattgcttatttcgaacaacaacgctagggagtctggcaaacagctaagcccaggaagggggttgcgggttagaggaccctctgagtcaccgcagagacgcctaggaagctggaagacagccacgccccctccgtgggctcctaggagccagtgactcaggttttctgtgctgctgctgctgaaaaaaaaaaaaaatcccacagaaaacctgttaccatagcaacgcagctccaatatgattccaaggccaagtggggcctttccccctggctgagccttagagggcccattctggaagggggctaacttccctttccggctgaggtgggagggcccaccatctccttggcaacaggccctcacgtcctttcacggtcccaacagaattgagaggcgattctttttggcaagggagggaaactgaggcagagagcggagaagacattccccgaagggtgcctggagtccacctttggtgccttggtggcctctttattaaaaagtggttgcacaggcccctttgttccagtacctggagatgagacccacatggtgaggccctttttgttctctgtctggacgtctcatttttcagaggtactgggaggttgaaggttggtgtatgtccacagcactgtgctgtcttgaactcagtgcgcatgacatcttgggccagggcctctcctttgtgtgagggaagctagcatgctgggaaactccgactcctttagtccacccactttagttgtagtttttgtcttgtagcccatctggcttccaactctccatcctcctgcctcagtctccagggtgcggcgatgacaggcataggtcaccacaggcttctggcctccacttgatggttgccggagtggctgggagtggcttttcttttcttttcttttcttttcttttcttttcttttcttttcttttcttttcttttcttttcttttctttctttcaggcagggtttctctgtgtagtcctggctgttctggaactatgtagaccaggctggcctcaagtgctgggattaaaggcgtgtgccaccatctcttagtggggtttttatttgtgggaatgtggggataaaacctgaggcctgggcggtggtggtgcacgcctttaatcccagcatttgggaggcagaggcaggcggatttctgagttcgaagccagccagggctacacagagaaaccctgtctctaaaaccaaaaaaaaaaaacaaaaaaccccaacaacctgaggctttgtgcaggacacatgctctaccactgagccacaccccagcccctcactgggggattctaggcaggggttctaccactgagccacacctccagctcctcactgggggattctaggcaggggctctaccactgagccacgcccctagcccctcactggggggttctaggcaggggctctaccactgagccacgcccctagcccctcactggggggttctaggcaggggctctaccactgagccacgcccccaaagccagtttttctttctttttaaaaaaaaatacattttaaatctaattacctttatcagtgtgtgtgtgtgtgtgtgtgtgtgtgtgtgtgtgtgtgtgtgtgagagagagagagagagagagagagagagagagagagagagggagagagggagagagagagagagagagagagagattgggactgactggtcccagttctggctttccctgactgttccattccccgcagtgggcacggttagatcaggtggggtcacttaggctcgctagcattgggtgtggctcttttctgcccagtatgctgtgctaactcagctgtccctgcacgtggcaggtcaattacaggtaggctgaggggacagtgggtgacaccctgtatatgtgtagccaattgttctcttaatatttagccatccctagtgtgggccaggggcaggagagccatttctgcctgagaaggttgaacagactacagcccagagctgtggccttggggtggctgtctagcctgggatggccctcctactctcctctgtgcttcagtggtagatcctgtggaggcactgggccagggtccttggggacctatcatggaagccatgtctgctgatccatatgtctagaaggggaggcatctgtccatccccactcctgaagtcaagggaccccttggtcttgcagggtgaccttgggccaaggccagccacctctgagctccatcttctgctttgtgaggtagaggtaagagcctttggcattgacaacacagatagagactcggttgggtcagggtggcattggctggcatactcttgggtgtagtgtcaactaaggatgagttcctaggggcaaggctgaaggtggcatctaccatcccataccacgttctgctgcctaaggacgcctgaagacaactgtgagactggcagtgtacactgcttccaagctgaggacattgttagaatcccagatccttgaaacaatgagtttatcttgttaggacccaagatcccactcctaggtggagtcaaagccttgggagcggcaccttattggggctcagtgaggtcatgtgacatggaaaccatgtagtgttactatgtagcaagaagttagaaagccatgcaacaaacctgtaattccaactcctgaggcagaggcaggtggatctctgatttcaaaggtagctccagatacactgtgagaccttctcaaaacaagacaagcagactggagagatagctcagaggttaagagcactggctactcttctagaggtcctgagttcaattcccagcaaccagttggtggtcacaaccatctgtaatgggattcaataccctcttctggggtgtctgaggagaatgacagtgtagtcacatacgtaaaataaataaatctttaaaaaaagaaaagaaaaatgaaaagggaggggggtgatggagacatggctcagacagttttttgtttgttttggctttttggtgtcttttcttctttctttctttctttctttctttctttctttctttctttctctctctctctctctctctctctctctctctctctctctttctctatcttttctcttcttgtcttgtcttgtatctgtgtagcagccctggctaccctggaactcacctataggtcaggctagccttgaactcagagatcagcctgcctttgccttccaatgctgggttaaaggtgtgctccagcactgtccactctggaccacttgttcttgtattcacctagttctcacagggtggctcatgacagttccaggcgacctgacctcttagggcaccaggcacatgtgcgcatattcatacacacaggcaagacgttcacacacgatacatacaatacaagacgtatctttctaaaaattaaagaaaataaatgagaagcgagagggaaaggagggagagccactgtttggactggaccaccactggcagggaaatgccagaaggttcagacagcattcagggtttgtggctggtgggggcagggataaaggaggagttttctaaaggaacatgtggtctgtgcgtgtgtgtgtgtgtgtgtgtgtgtgtgtgtgtgtgtgtgtgttactaggggtagactccagggccttccaccatgctgggcaaacaatttacactgagctatattttcgaccccctctttattttatttttattttattttatatatagctctgactggcctagaactcattatgtaaactaaggtgacctcaaactcacccatactcaaatgagattcacctgcctctgcctcctgagtgctagagacagtcatgaagcaccacgcccaccttctctttaaaaaaaaaaaaaagcctattgcttttgtttttatttttgtctgtggagggtggtgcccacacccagtggtgccagtttggaatcagttctcctgccctattctacctagggatcgaacgcaggtgggtaggtttggcagcagctgcttttaccccacgagccatctcgctggcctgtagccctttgtgtgtctgtctgtctgtctgtctgtctgcatggagtggagtctcatgtagctcaggctggcctgcgagttatgatcttcctgaccctggtatccaagtgcggagactgcaggctcactctgccacgcccttttacacagttctgggatggactctgcatgtcaagtgagttatagccacggccctattttattttattatttttgagatcgggccccactcatcatggaggctaaggtcggcctcctgagtggtgggatgacaggcgtgggtcgatgtgcctggctcctactctattcttttactttcacacatacccactacaggaagcgagtagcgagcccccttttaccagcaccccgccatgtgacattccgcagaaccagcgccatctgtgtgtttattcaatggttttggttgtatttaaagcaaattccccacactggtgcttcttacccagaaacgcctccatctgtagctacaaaaccaggccattccttacataacggcagcgttgcctaactggaaccgatctttaagacccaatccaggcccacgggagagttctgctaggccttagaacatctttgtgggtggttcgtttgaagtttgatggcttccttcctcccctgctcccctttctccttgccattttgggcactagagtttaaagaaacccgcctgccactgaactaaatccccagatttttttttttttaagtttttttcgagacagggtttctctgtgtagccctggctgtcctggaactcactctgtagaccaggctggcctcgaactcagaaatccacctgcctctgcctcccgagtgctgggattaatgtcttatgtatcccagactggtcttgaacttgtggtcatgcctggagtatcctattttgattgtttatgtgtatacccctaatatggatgtcagagattcatatcatatgtgccgtctttggtcatcctccatacttttgggggatgtatgggggcagggatggagtctagcctgggctgtggtaacacacgcttttcattccagcattaaagcagagataggtcgatctctgagttctaggacagcctgggctacacagggaaattctgtctcaaaaaaaaaaaaaacaaaaagagagaaagaaaggaaaagaaataagagtctccctatatagccctggctgtcctagaacttattatgtagaccacgctggtcttggactcacaacagagatccatctgcctctgcctcctgaatgtccactctctgcttggagacaagaatcgctcagtggcccggattcagggattcagctaagctggctggtccctgagctccaggcctccatctgtcttggcttccctgtgacaggattatcggctcatgccaccgcgcctggctcttacaccattcctagcgatctgaatttaatactctatggtcaagccatccttcaatgctccctcccctcctgttgagacagagtcttactcactcggtagcctggggtcccagaactcacagttagtctcccgtttgtttcctgagtggtgagatcgttcctggctagccttggctgctgatttggtagcctggtcccgcccactgcttaggattatcactgaggagtttaagccacacttcaggaagccctgtggatcctggaatctgagtgagacaagggtcacacagtggcctgaccggctctggtctctctctgcaggaatggacctgtcagccaatcaggatgaagagaccgatcaggagaccttccagctggagatcgaccgcgacacaagaaagtgtgcctttcgcacccacacgggcaagtactggacactgacggcgaccggaggtgtgcaatccactgcgtccaccaagtgagtgacaccctacaccccttcatcacctggcctggctcttcccccaggactgggcagcctgctcgatgcccccacgttgccagcccctcttctcttccccaggaacgccagctgctactttgacatcgagtggtgtgaccgccggatcactctgagagcctccaacggcaagtttgtgaccgccaagaaaaatggccagctggccgcctcggtggagacagcaggtagtcacttgggggcacgtaccctaagcctgtttccctagtaccccgtggtcaaccatcagtcccacctggacctctctgtgtgttcagggaatccctgtaagctggtgtaccctcaggccagcagcctgtgacccttagcttcttggtatccctctctgctgagccattccctgactggcccatctttgttgctgtgaagctcactggctccctttccctgtggcaggggactcggaactcttcctcatgaagctgattaaccgccccatcatcgtgttccggggggaacacgggttcattggctgccgcaaggtcacgggcactctggatgccaaccgttccagttacgatgtcttccagttggaattcaatgacggcgcctacaacatcaaaggtgggttcactgggtgaggatgcacctggccattcaaagccgacattagggaacgggtgtcctatgaccgcctggggtagcccctccccccttgtcttagaactttcctggcccaacctgggcagacagcgaaggtgggaagcagctagggagagtggtcgtggctccaatctgggaatcggagacaggagaattatctttttttttttttggtgttgaggacagaacccagggctttgagcttattaggcaagcattctactgctgagttaaatccccaaccccaagaatcatctcaaaaagaaagaaagaaaagggaaaaagaaggtggagcctggtggtggtggtggcggcggcggcggcacacgcctttagtcccagcactcaagaggcagaggcaggtgggtctctgagttcttgccagcctgctctacagaatacattctaagacagccagagctatgcagagaaaccctgtctcaaaaacaaacaaaaaaagggggtggggagagaagatagaagataaggatattccttcttagctagctgtgggaccaaaaccagtgagaggacacagcaatccagaggtgtcagtcagaatcagagccctgtgctgtgtgtggccttagcaaggcaaacgggactcctttcttacagtgctgaggactggactcagagctaagatccagcccctccctgggggattctaggcaggggctctaccactgagccacgcccccagcccctcactgggggattctaggcaggggctctaccactgagccacacccccagcccctcactgggggattctaggcaggggctctgctgctgatatatgtcctttttgtttgtttacttgtttgtttgtttgtcttattgtggccctagctgtcctagaacttgctttgtagaccagagatatacctgtctctgcctcccaaatgttggatttaaaggcatgtgccaccatgccccaccctagcctagccctcttatgttttgtagtttgagatggcatgtcagtagatttcccaggatggccttgaatctaggtaatcctcctgcctcagtttcttgagtatttgaattatgggactgtaccttacatccagctgagcccactcagttctggaagctgacagcgggagggagtgttaatcctttggggactgacaaggtggggttaacatgtagtctccctcctcagactccacgggcaagtactggacggtgggtagtgattcctcggtcaccagcagcagcgacacccctgtggatttcttccttgagttctgtgactacaataaggtggctctcaaggtgggcggccgctacctgaagggggaccacgctggggtcctgaaggcctgcgcggagactatcgaccccgcctcactctgggagtactagggccacctgccctctgcaggccgctctcgtcagtccctcctgttatccttactcatcgggtggccctgcagcaggtggcaaaccccttgcctttcaaactggaaacccaagagaaaacggtgcccttgctgtcaccctctgtggaccccttttccctaactcactgctccccatgggtcggtggctgcagactgtccccaggagggactctggttccctctgtccccttctttccatggggaactctggcacctttcttctgacctcagtcaactctgagccttatttccccccaggaagtggcctaggagaagctacagggcctagggacttaccctgagcttgtaactggaagaccccgtccctatccccgctcccgcccccaccccaccccacccctgctctggccccagcctctggaggccagccttttggcgggactgaagccgggcatggccaaccttgcccacaagtgtttttctggatcttggctggaaggcagtctgtcccatcctgcagtgtttgggcctggctctttgactcaaagctagctaggtggcactccgtgtcgctcctgcacattctggaaggggcgggcctctcacccacctcattccttttccccctggcctgactggaagcagaaaaatgaccaaatcagtatttttttttttttctttaaggaaatgttactgttgaaaggccctaggcaagcctgccctgttggttgtagtcgtgagtggtcttggggggagatgcttggctcctgtccctgcctccccagcgggttccctccctccctcctgcctgaccaccccagctctggctctgtgattggtgctccacgtcttcccagacacctcggggctcctgggcgggagaaagccggatgtgcccctccctgggagccctggagtaaacctcagggggccctttcccaatcacccccttccaccgacccctcaacaccatgcatctcactctgggtgtctcgctcctttatttttttgtaactgtcatttctataactctgaagacccatgatagtaagctttgaactggaaaataaagtaaaatcaagtctgcggcccgtgtgtgtctcaggggaagtggatgctggagtgggcagagggccggctgggagggaggcagcgctgattgattggcagcccgcagactcttgtttcggtctcggaccctagcggcttcagcatatgccttagtaactctggactgagaaatggctgacacgaggttcccgagccttacaagctgggcaggctagagggttcagcaggtaaagttgtgtgctgtcaagcttgatcagactgagtccccagcaccgtgtgaaaagttgggcacaacggtgtacacccaccccagggcctctggcaagcacagagacaagaggatccttggagcctgctggcggcccaaccttgcccaatctgtgattcccattgagtgagccataaggtggagatgggttttggaagataccccacataggcctgcggccccccacacccggaaataaaaacaagccaggcttgtcatcccagttattcggggagctgaggcaggaggatcacagatttaagactgcccaggttgaagagtaagttcaagggcagcctggacatcttgctagattgtttttttgttggttggttggtttttgttttgttctttttttcgagacagggtttctctgtgtagccctggctgtcctggaactcactctgttgaccaggctggcctcgaactcagaaatccgcctgcctttgcctcccgagtgctaggattaaaggtgtgcgccaccatgccaggcttagatgttttaaatgaagggctgtggagtgtggttcacgggtagcctcgctcagacaggctggggcaggagaaatggatggctcagcattggctgctgccttagggtttccattgctgtgaacagacaccatgacctggcagctcttctgaaggacattggactggggctggcttacaggttcatcaaggcaggaagcaaagcacaggcatggtgcaggaggggctcaagtctacgacccgggtctcaaagcccacccccacagtgacagactttctccaacaaggccacacccactccatcaaggccacacctcctagtagtgccactccttgagccaagcttattcaaaccaccaatcacaactgcttttctagaggacccaggttcaattcccagcatccacatgacagcttacaattgtaactacaattccaggggatccaacacccttacacaggcacacttacaggaaaagcactaatcagtgcacataaaaatacataaatcgttagagagaagagaccattagctaccttcacccttaacaggcaagctgaggtcctgggagtgtgttagaggtccgcagcttggagtctatagggtagtggcatcgtctatacgttccttccttgacaggtaggtacttagctgagacctctggggtatcccagagacccattttacagagggaggcactgaggcggagggaaaagacaaccttgtttgctggctcagaagagtgccagtggggtacccacccacaaggctcagcatcccgaggcactgtggaggcagttacaaagccgcattgattggctgctgatgacgaaatgaagagccccgcggtgtgattggcggtcccagagggaaggcatgtggggagattgacaggggcagatggccacaaagggtccagtgacttcccgcagggtggaagctctgggcccaagccagtaaagtgtcaatgacatggagagacagatgaatccttcccagttgaattctcaggctctggtggggccgcgctggggagaaaagacaccctgtccgttacaaccaccaagcgcagccaggctacgtgatgactgggggaagtcccagacgtgacttcctgcagcactggaggggagggtccgacggaggaggctgagagtctgttggaggcagccgaggatcggagggaagaggcacaggtcttacatgggaggcataaagtctggtgggagtccaagggaggacggatgtagggtgatgggaagaaaggacctaatccagaaaaaggaacagaagagccacctacctggttaggggacgctggccctccgcagggaaagctgtcaaagaaaggcctggctaatgagaccatgtcgtggggggcccaggcaactgtggaggcatcagacaccttggggcaaggagggcacccatgagctagtacacaccactaagtatctcagagtcctgcacacacactcattgacacaggtgggtgagcagcacccacgggcagctgaagctgagtatcctgccccccccctttgtttcttccaactgagcagggacaagaaggatccctatgaataaggctttttttgtttgtttggttggttggttgggtttttgacttggtttggtttttccagacagggagtaaagacatacaccaccataacccagctttgtaaatctggtttttgtgtgtgaacctatgaattccactcctgttgcactgatgggaaattgaggcaaagtctcaaagaagctgacagcacaggctagtgtgttcattttctctctacaaaaagaggaaaaattggggctggtgagatggctcagcggttaagagcattgactgctcttccaaagcaggtcccgagttcaaatcccagcaaccacatggtggctcacaaccatctataatgagatctgagaccctcttctggggtatctgaagacagctacagtgtacttagatataataaataaataaatctttaaaaaaaggaaaaattatttattattttattattaaattaattgttgtatttatttattttattaatctatatttaatttatttttttattttgtgtgcatgagtgttttgcctgcatgtgtgtgcactacctgtgtgtccactgcctatggaggtcagaagaaggcgttgggtccgggaactggggttgtatggttgttagccgccgcgttcatgctggttctctgcgaggcggcacttagtcctgagccatcttctgtcagctcctctactttcttttagacagggtctcctgtagctcaggctgggcttcagcttgcctggtggttaagggtgactaagttaaatcatcttacatttctgcctcacttccacctcctgagtgctgggcttgcaggcatgtgccactgggatgggttttgtttcctgctggcttctcaccccgtagctccgtgtgttgggtcagggccagccctgtgcccactgagccattaaccctactgagcccactgtagggaaaaaccatagaggagcttctatgaccctcatgggtccctccaggtctgtcagagttcaggaggcatggatctctctggcagggagctgttgactttagccttggaatttcccaaccaagtctacactgagcaccctgtcgacgacctgcttctgactcctcctgtgaggctcttttggagtgatcttagtccccacagggcccccatcttctccagagctgagtggcctctcctactggacagagaagagctgtcctgacttggttaaaatgttgaatgcaaggagcggaggaaacggcccagctggtgaagtgtttggctcgatccccagagctgtggagttcccaacaggatggggctcactggctgccctgatcagcaagctcagaaaccaagatggatagctcctaaggactggaattggaggatgacccctggtgacagacacacttgcatatgcatctgtctgcacacatacacatatgcatgtaaaaccctgatccacgtggtagtgcctgactgtaatcccagtacttgggagacaggaacagagaatcaccttcagtttgaggccaacctcgtctacatatccagcaccttaggagactctgtttccaactcttcagggtggctcacatctctaatctcaaccctcaagaagccaagactggaagatgcctagagaggaaggtttgcttgggttcagtgccagcctccagaggcagaggcaagcagatttctgagttcgaggccagcctctacagagtgagttccaggacagccaggcagccagggctatacagagcaaccctgtctcaaacaacaacaataacaacaacaacacaacaagaaaacttgagtgtgcgtgtgcgtgtgcgtgtgcgtgtgcgtgtgcgtgtgcgtgtgcgtgtgtgtgtgtgtgtgtgtgtgtgtgtgtgtgtgtgtgtttactatttacagtaaacgagtctttggggaggcagccaaagtaggcgaggaactccttgtcccctgctgggctctctgggttgagatcttgtcttgatggggagataggaagggattctctgtccctcagggtgctatcagcagagggaacagatggggtcgggagagagactgggggaggggagaatcagggtggaggagggctgtgatttaggtttaccatgaaaccggagtcatcaccggtgggagaggctggtcagagttcctcttttttcctcttctttccctaggacccaggcctgatccggtggggaggggaatgattggaaaatgctgccttctagagtccctagcgagagccacaccccaggcctcagccatcaatgacaacctttctgttctcactgaaagcaattaaagatctgtaagatgagtcagtgttacccattgtaagctgctgactgccttggtcccatccctgggacccacatggtggaaggaaagaatggactgatgcccttggacccccacgtgtgtgctgtggcacacacacacacgcatgcacacaaaaataagtaatgtagttcaaaatttagaataaatcaggcgtggtggtgcacacctttaatcccagtactcgggaggcagaagcaagtagatctctgtgagtttgagaccagcctggtctacagagtgagtttcaagccagccatagatagctacatagccagatcttgtcttagcctcctccttctaccaacagaaattaagatcacaaataaacaggaaagagggtggaagagacaactcagtggctatgaacatttgctgttcttgcagagaaaccaggattgagtcccggcacccacatagtgggtaaacattatctctagctcaaattccagaggacctggcttctgagagcacggtacacatggggtgttctctctctctctctctctctcacacacacacacacacacacacacacacacacacacacacgcaggaaaaacagaaaagcacataaaataaaaacaaatatataaaaatagaatccaaggggattcaacgatgtcatgagtccacagaaatcctatcctcccctttttcggggtgttacacgggcggatcaaacccaggggctcccacttgctaggcaagtggtctaccacaaacatgaatccttggctcacccttttatatttatctttgagatgctattggttttctgttttgctttttgtttgttttgtgcctgtttgtgtgcggtgtggagtgtctatgtgtgtggatgctccagcatgtgtaagtcagatgttggatgtcttcctccatcacaccccacttatttacttttgcagggtccatcctggaacctgacagtaccctgacatagctagctggcttactgtaagacccccatcactgtctcggaagtgcagaattccaagctgtctgctatccccgcagtcatgggcactagagatatatatggactctggtccttgtatttacttggtaacagcttttcccactgggccatgccctcagcatgcccatctcattctgtttggtaggatctcactagatagtcctgcctagcctggaactccttagagttagtcttgaactcagagatctgcctgtctctgcctccggagtattgagattaaaggcacatgccagtataccagacctctttatgttttatttatttatctttttgaggcatacttttaataggtactccaagattggagagatggctcagcagttaagagcactgactcttcttccagaagtcctgagttcaattcccagcaaccacatggtagctcacaaccatctataaaaggggtttgatgtcctcttctggtgtgtctgaagacagctacagtgtactcatctaaataaataggtactccagtctggcctttaatttgtggcaattctcctgcctcagcctcctgagtgctaaggttagccaccacatctggcttcaacactttcttatgttatttcagaactttttgtttattttgtttttttttcctgttgttgttgttattgttgttttgtgagtcttgagacagggtttttctatgtagccctggctatcctagaacttgctctgtagactggcttcgaacttagagatctgcctgcctctgcctcccaagtgctgggtttaaaggtgtgcgccccactgcccagcagtttatgtagtgttgaaggtccagtctagatcatttcattcatggcaggcaagcaccattccaactcagcaacatccctagacttcttaatttagtcttttaaaaaaatgtgggtgttgggggctggtgaggtggctcagtggttaagagcaccgactgttcttccaaaggtcctgagttcaaatcccagcaaccacatggtggcttcacaaccatccctaacgaaatctgatgccctcttctggagtgtctaaagacagctacagtgtatttacatataataaataagtgaataaataaataaatattttttaaaatgtgggtgttgggattggagagatggctcagtggttaagactgctctttcagggggctggagagatggctcagtggttaagagcaccgactgctcttccgaaggtcctgagttcaaatcccagcaaccacatggtggctcacaaccatctgtaatgagatctgacgccctcttctggtgcatctgaagacagctacagtgtacttggatataataataaataaatcttaaaaaaaaaagactgctctttcagaggggcaggcagatttctgagttctgtgagccatttcttcaacctagatatataatgcatattgtatataatctcattatatatctaggttgaagaaatggctcagaggttaagagcactggctgctctcccaaaggtcctgagttcaattcccagcaactacatggtggctcacaaccatctgtaatgggatgtgatgccctcttctggtgtgtctgaagacagctacagtgtgtgtgtgtgtggtgtgtatgaaataagtaaacctttttttaaaagtgtggttgtgggtgtgatatttgtactacaggagactgtggaggtcaaatcaacttgcaggagttggttctgtctttctaccacatgaatcatggggttggaactcaagttctcaggctgggtggcaaccacccatacccattgagccaccctacctacccaaatgtcctctccataaaggtaggttgtcactcacggacagcttcgataataaagtcttagccccaatgacctctgtgtgttatatttgtagacagaaccttttttatttatctttttcctgagacagggttttctctgtagcctttctcctggaactcactgtgtagaccaagctggactcaaactcagagactggcctgcctctgcctctggaaactgagaataaaggcctgtgacattattgttcagcctatgagcaggacctttaaagaggtgaagagaagccaggcctggtgatgtaggcctgcaataaagaaagaggtgagggggctggcgagatggctcagcgggtaagagcactgactgctcttccaaaggtcttgagttcaaatcccagcaaccacatggtggctcacaaccatccgtaatgagatctgacgccctcttctggtgtgtccgaagacagctacagtgtacttacatataataaataaataaatcttaaaaaaaaaagaaagaaagaaagaaagaaagagagagagaaagaaagaaagaggtgagggctgggtgtggtggcgcacacctttaatcccagcacttgggaggcagaggcaggtggatctctgtgagtctgaggccagcttggtctacagagtgagttccaggacagccagggctacacagagaaaccctgtcttgaaagaaagaaagaaagaaagaaagaaagaaagaaagaaagaaagaaagaaagaaagaaagaaagaaagaaaggaaggaaggaaggaaggaagaggtgaataggataaaatgaggtccaataggttgggggcatggctcagtgttagagggcttgcctagcaagtgagaggcctgggttcaacctctggcactgaagagggatggtaggtaggtaggtaggtaggtaggtaggtatctagatagatagatgataaataggtagatggatggtagatatatagataatagatgtgggatagatagatgatagagatatacatagatgatagattatagatagatagatagatagatagatagatagatagatagatagatagacagacaaatggtaggtatatagatgatagaaagatgagggataaatagatggtagataagtagatgatagtaggtagatgagagggagagagagagagagcgagagagagcgagaaaggatataataaggtcattaggctaatttgatccaaagacagattggggttcttataagacaagtgatcaagcaggccagatatggggggaactgatctgtaattctagcacctggggtgggagatggaggcaggaggaaggggaggtcgagggtatccgcagatacttagtgagtttgaggctatccccagccacgtgagactctggcaaatccttccgcactaacaacaaaaattctgaaaggcaaacctcccttaactcataaagcatgaattggggcgtatgcgggccttcagagccatgtggtgtgtttgggaacagacgacaggaaacactgttgagaggactcagacccagagaggaagggacagcagagtcaccatgtggacaggcgttggggcttgctgggccgctcacaggaagcagcgcacaccagagccatccgcctaggagctgggccacagtttcctgcagagtgggccctgacacacccggccaaagcaagcactggcctgtggacagaaagcagacacaggacggagcccgttccggggtcagctcactgtacttgaagatgtgagcccaaagaagtggggggtgccacggcgtcttttgcagatgttactatgccagttggtgttagacacttagatatatttttaagaagagcagtcggtactcttaactactgaaccatctctccagccccacaatgacattcttcaaagagcagagcttagaggcacaggcacttgtcaccaagcagcaacatgagtcagatccctgaaaatccacaggcagaaggagagagctgactcctgtccgttgaccttcatgtgaatacagtggtgtgtggtggtgtgtgtgtgtgtgtgtgtgtgtgtgtgtgtgtgtgtgcatttatgccatgtgtgtcaagagtgtgaggaggacccaagagagttcctagacttaaagctggttatgaaccgtctgacttgagtactgggaactgaacctgggccctctgaaagtgtagcaaatgtcttaatgtctgagccatctctctagcctctgaaatatgcttttaattgaacacctctctctctctctctctctctctctctctctctctctctctctctctctctcacacacacacacacacacacacacacacacacacactgccccacagacacacataaaattttaaagttttttttttcagccgggggggggggtgtgtgtgtgtgtcacttttcaagacagggtttctctgttctgtgtagccctggctgtcctagaactcgctctgtagaccaggccaggctcagtctcacaggttctgagattaaagtcttgctccaacaacacccactaaaagacctttttaaactaactgtaacccagcactcagaaggcagagtcaggagcatcacaaagccaaaagcctcctgaactccaccatgaagccatctctcactagcccaagggctttgggcagagccccacagcagggcatgcatctaagcgcgcccacggctctaactggcatctcagcacttcaggaatgcaagcgtgaacagagctgccttgtcatcgggccattgcactctggagaacagagcgtgttttgcgcgctctctctctctctcctccctctccctctccctctccctctccctctccctctccctctccccctccccctccccccctctctgtgttggtgagggagaggataaggcctccctgtcttcagtgctgagactctggatctataaagcagcacccggctctctacacggcttttaggggttgaactcaggttgttaaaacttgcatggttagcacaggcgagctatctcagcctctgcttgagactgggtctcacagtgtagggttggctcacctgtcactttctgtgtagatcaggttggccacaaacctttggtaatcttcctgcctctgcctcgggagttctgccggtattataggcatgtaccactatacccagcttaattttttttttcaagagtttctctatgtaggtttgactttctttgctttgtagtccaggctggcctcaaactcagggcgtggaatctcccagtgatgggctggggtgtggctcagtggtagagcccctgcctagaatcccccagtgaggggctggggcgtggctcagtggtggagctcctgcctagaatcttccagtgaggggcttggggcgtggctcagtggtagagcccctgccgagaatcccccagtgaggggctggggcgtggctcagtggtagagcccctccctagaatcccccagggaggggctggggtgtggctcagtggtagagcccctgcctagaatcccccagtgaggggctggggcgtggctcagtggtagagcccctgcctagaatctagtgatagaggatctgcctgcctctgcctctgtagttctgggacttaaatgcatgtacccccttagctggctactttttaaggaagtatgatagtattcaccacaatggctgtcccatcttacagtccatggcttgacagttccgattttgtttgttcacacatgggctagcatgcaccccatagctgggcgcctgagttgtcacctaacgaatattcattttccttatctgcacagacaggcctcactgtgtcttcagctcacacgctctgtgagtggatgaatgtcacatcttatcgacatccccccactccctgtcgcagacatcgagtctcattcatcacaaatacaaatacgcccgtaagagctgctgtgtccatgaacctttgtgcgaatgtctgagaaaattccctggagggcaatgctggcccatctgacactttaataaatgtggctggattaaaagaaagaaagacaaaaaaacaaatcaaaccaaaccaaaccaaaccaaaccaaaaaacctgacttggtggtgcacccctgtaatcccagtgctaggggaagttgaagctggagactctggagtttgagggtagcctgggctacatataagatcctgtttcaaaacaaacaagatgagaagtcattcagttggtagaacgcttttctagcaagtatgcagtcttggctgcctaaaactcaccatgtagaccaggctagccttgaactcatagagattcatcttcctctgcctcctgagtgttgggattagagcatgtgctacaatgcatgcttggttagtttttggttttctgatgtatcacaatgtagtccaggctgtgtttggactcctgatgctcttgcctcagatcttagagaacaacaatcctttagtaacactctcctgcagagctgctggccaggacctaaccagcccagctgagggtcgtgatgtagggatgtaggcttgtcatcacagacgctttccgcaaccactgagtcacacccacagcccctcactgagagattccatgccctgagccctcttattatttgaaacagtgtctcactaagttgcttagcctagctttgatctcactctgagatcagttttttcccctctctccaattaagtgtctttttctcttcctagaatcccccagtgaggagctgggggcgtggctcagtggtagagcacctgcctagaatcccccagtgaggggctgggatgtggctcagtggtagagcccctgcctagaatcccccagtgaggggctgggaagtggctcagtggtagagcccctgcctagaatcccccagtgaggggctggggcgtggctcagtggtagagctcctgcctagaatcccccagtgaggggctgggggcgtggctcagtgttagagcccctgcctagaatcccccagtgaggggctggggtgtggctcagtggtagagcccctgcctagaatcccccagtgaggggctggggtgtggctcagtggtagagcccctgcctagaatcccccagggaggggctgggggcgtggctcagtggtggagtgagcatctgtgataacatgcctgcatcaacccttggctgggctgcttctttggctgttgggaatgacatcccatgaccactgcaatagaaacctttctagtgagcatctccatggactttgaaagcttcacatggcaggacgatagggagcagggagagggctacccaggcaactctctgttttgctgatgtgaaaaccaagactatagctgtccagagtgacttgcacaccatgacactggcaaaagtaacttgatcctaaaaacagcaagccaactttcatgtgacttctagtgggtcccactgtcttcaccaaggccatttcataggatccacagcaagttcccttctgggctaagagccttgtcttcctagctcttctctgtctcttctcccttcaactctcctctctttcccctctctcttcatctgaggcacagcgtcactaagtagtgtaggctagtcttgaactcactctggagtctagtctagcctttagttctgtggtgtcagatcacagatgtgagccgccattttcactcctcaattcccaccccgtcctcctttctccctttcttcccctactcttctcttctccccttctttctgagacaaggtcacattctgtgtcctaggctagtcttgaacttactatgtagctcaggttagtcttaaatttattacatagccccagctaacttcaaagtcttactgattgtcttgccgagtgctgagatttacaggcctatgtatgattccgtgtccatacatagatgcttccacacggcatttcctaagcctacctggccctgatctggggctgaggaggtatttctgagccaagtggttgtttatggtcttttgggggtttggaaaatatccttaaggagattattaatgggagcgttagtgccacagatggggaaagaggtcaagagctaggactgaagccgggtgtggtggcacatgccattgatcccagcacttggaaggcagaggcaggagaatttctgagttcgaggccagcctggtttacagagtgagttccaggacatccagggctacacagagaaaccctgtcttgaacaaacaaacaaacaaacaaacaccccccccccaaaaaaaaaagagctaccagtgtcctggtttcctgtggctctgtcagctctgacttcatcctgggggcttcctggttggccctgtgtcctgtcaaaatggaggggtgagagggatacttttaggcccatcagcataccttcagaggttgggtggactggtgtggccatgaagcatgaaggctgggggggggggggggtttacaaatgttcttttagccgggcgtggtggcacacactaatcccagcactcgggaggcagaggcaggcggatttctgagttcgaggccagcctggtctacaaagtgagctccaggacagccagggctatacagagaaaccctgtctcgaaaaaaaacaaaaacaaacaaacaaacaaaaaaaccaaccaagtgttcttttaggttctttgtttgtttgtttggtttttttaggtttttcaagacagggtttctctatgtagccttggctgtcctgaaagtccatctgtagaccaggttggcctcaaactcagagatctagctgcctctgcctcctgagtgctgggattaaaggtgtgcaccaccactgccctgttcaccaatgctcccctgagcattgtagcccagttgaatgctaacccagcagggattggattcctggttcaatccctagcggcctcagcatccctgtgcctttgctctgtgacatcacaccaggccacccttgaatgctcacagtgcagggaagaggacatagtctcctgaggagtttatgtgtttgttcgtttgaaataaaggcaggatatagccttggctggcctcgaaacttgttatatagaccaacctggccagcctggtctccaatgcagagatctctcaagtgttggggttagtggtacgacctactacctccagctaaagttagatttttttagtttattgcattgtgtgtatatatggtgagtgtatgtttgtctgtgtcatggtgcaagtgtggagatcagagggcaacgttcaggagttgtttctcacctcccaccctgggatccggggtgccctcaggcgctcagagcctcatcaggtagccctagaattgactaagtagaccaagctgggcttgaacacagaggtttgtccttgctgggattacaggcatgtgccaccatgcccacctaagattgtcttatttgtctttattactgtcagtgtatgctttacatatgtgtagtgaagttcagaagccatctgaccacatccatatctacgtgggtcctggggatcaaactcaggttgtcagggttgcatagcaaatgctttaccccaagggtacaagctcatgctcaccccagaatgcagtctttgtcagacaggaaatctcagtgtagaccagcctgggctggatcacagagatctgtaatctttgcctcccacgtgctgggtgatatcaaaggcatgtcccaccatgtctagctagaattaatctcgagtcttactttaatgacaaataataggtcccagaacctgggctccaatggcctggaggacttgctggacaaatttgacagacatcctagggccaccacagcgatgctgtttatgatcactgacagggctgggctgggcatgactgggagagacgcatcttcccttcgcttccacgttccttactggcaagcaaaacaaaaagcccttggtagaggaagcaactgaggaagactcaggcagccctcaagtcatgccagtgactgtctccccagtggtcacaggatcagagtgcttggagcttggctgccaccctgagagggaaacccttgaagatagtagtactgtgcaccaaaggcagctgggcacactggcacctggccaaggaaggattccaagttcaggcttcacaggaagactaatttggcattcctctctccctaaaaaaacgacacaacaaaagcaaacaaacaaacaaaaaaaagcctgaagtggggctggtgagatggctcagtgggtaaaagcacccgactgctcttccgaaggtccagagttcaaatcccagcaaccacatggtggctcacaaccatctgtaacaagatctgacgccctcttctggagtgtctgaagacagctacagtgtacttacatgtaataaataaataaatcttaaaaaaaaaaaaagcctgaagtatatgtatcatagcaagaaccacaccaatccttctctaacaagagatgttacatggtaggggctggaaagatggttcagtcagcaaagggcttgcctcacaagcatgaggattcgagttccacctaaaatacaaaacgagacccagccaggggcaggtatgtgtagtctcagcactagtgagggggaaatgggctcctggagcctgctagttagccagccttgctaaattagtgaatggaggttcagttggtctcagaaaataagatttgcctgatagtgcacgcctttgatcacagcccttgggaggcagaggttggcagatctgaggccaatctacaaaatgagtcacaagtcagtcagggcacacagaggagccctgtttcaagaaaaacaaaacagagcagcagtactggtgcacacttttaatcccaagatgcctttaaaccagaagcagaggcaggtggatttctgtgagtttgaggccagtctaatctacagggtgagttccaggatggccagggttgcacagagaaactgtctggaaaaaaaaaacccaaaaccaaaagctaaaagaaaaacaacacaataaaagacaggaaaccagttgaagaacaaactgactcctgctctccatagtcacatttgtgtgcacagccccgtaccctacagatgctgtctatataggccaggtgtagggatgcacacttatagtcctaccacttggggctcagaggcaggggcattaagattgaggccagtgtgaacagtttatctgtgacccactaggcacagggtttttactgagggtcttgagtgtaacggcgatgacactggaggcccttagatttactttttgatttttaacttggacaatgtgtgagaaatagggtaaatccacacagcggagtatcgggccagcctgagctagagagccagcctgtcatcatcaactccttcagtgcacatggaatccgggaaagcctacggagaagggaagattcccgaagaactgaaagtagcggcctgaagcctagagcctcagcagcgggtgtgaacctgcaagtgggggtctggggaggtgcagggcaccactgtcacctacaagggagaacggtcggtttcctggccccacccagctgcagatgtaatgtgtaacctatactgaagcaactccagaaggctctggacaaccaaggaaatctgtaggcagtgactgctttagaagctggggatgtcgagaaatgttgtcccttcagcagaaaactttctgatgtgaaacaagtccaataaaacaataaagggcaggagagcatacaatgtcttctcaggagtgttgttttggctcttctccacctgcaggtcccactttctctgtgcccaggccctcctggccatgtggtggtgttatggagtgcaggtctcagaaggctcaaatccttccaaccagccagccaggccaggcacccccatgccagactcatggctgttttcttggccctgttagctggatgaggctagcccaggattagaggtctattctctaatgtcatactgggaacatttgggggggggggagggtcctccaaggactgcctgtgctttcttcaaggttctctgctaaagacacttctttattgtgtcctacttgggactcagcagccaaggcaccaagtttctcctctggcagatgaaaggggtcttttctttctggcctacgtcggggccattaggagtcctgtgtccttccctggagaagtgagtggtgcatggtgtgtgcttgcacccaagagttcctggggacctgtgatttaattggggacaaacagagccaagagaagcgttcacaaacatttatttacacaaaagtcaagttacatatgatacagtctttttacacagtagtttaaacagacttggttcctctatttttactaccaaaaggtaaagaaaaacttttaaccatctacttcatttttttttctttttttcttttgtacaaagtgaaatcatgcacttttctcttaactttgaaatcttttgctaagtgcaaatactagattctctccagttttaaggcaaatacactgggagtggctaggcagtttctcacaccaggaagcagtccgggtcctagatgttaaggtggtagctgccttggggatccctgctggcacagaggtgttgggagggtcactcctggatggagacaggcaggagcagcctccctgcacccacagactgacacgaccctggcctcaccccagaaactgccagttgtttgcatctggtctcctggtggaaggatgtgagacgggtactgagtcaacctagaactgggtgcccagtccagcggctcacgaggccgtggaggggcagtgcttggagtacccacccagccacccacccatgcgtggggcttctggacaagtgcagagaacacggatactctaacagttaaggtacttggaggatcctgtcatgcagcatgtggcccatctttccaaggcactgtcattcagactaacatcacagttcaggtgaccatggcagggctcctgagccactgtgtgccccacccacactccagtgataatgggcagctcagggagccttccctttcccagggactttcccccttctaagtctgtacactctgaacaggggacacccccacagcaaggggaggacaaggacagccagtacaactgagaaacctgctgccggtcctgctcagcaaacgctggaggacaaaagcctggtctggacaggaggggacacaggcactgggaacatggcaaaggctctgtgcaggcctggactctcatcacacaggagctgggagctctcctgtgtgcacccactgctaactagtgagggacggggagcaggcagcagggttgctgtgatgactgtagcagctccatgaggtcatctgcactgccagggaacccccaacaccttaggagaaagaagctgctcaccccagaacagggcccacctgggaataaatgacagcttcctaaagggcccttttgtttgatggcaagtgtcaggacttctggctctcagcagttgccagccctggggaaatactttcaacctgactttccacggatagggacacgcatgagtagaccacaaaaaaaacttcagctcaaactacatgaataggagcaacctctttagataacaacagaacaaaactcgcgccacagattctcggaggctcttggacctaagtgggccttgggcaacaaggagagagccctggcttagggatggtaggccatttccccctgggctttcattgggctgctggggaggaagtatggcaaacgattagaggccttgcttcatggtcagggccactggattggctgctaagatggcagactagggagctgccctataattggcccagtgacaatcagcacccagagggcatcagacctgaaggagcatggaccttgcaaaggtaagagcaggaggacacgcgtccactttcgagagggaatggaggccttcacccctactcagaagatgagactgggccctcctgcagactcggcacggctgacagggctttgggtgtcagaagcgatgccgtggttgggggccaaagtgcatgggcaggttgtgctccaggggcacgtgcatgtggccaaagtcatagttgacacgcacgttgggcagaggggggacatagggagcgggcacaggacccatgttgatggggaagttgttgaacacgggccgcacaggtggcagggggaagggtgggtgaacaaaggcatagggcggcatctgaggatgcaggttctgtgggacaggccgcggcagggcttccacacgctgcaccttctcagctggcttctccagtgggggcccgatgcgtttgaaggtgttctctgaaaggaagatgggattcagtgaggtgaacagagcaaaccaacgccagcagatgcttgcctgactagggctctgcatgccacttctgaccctcactatgtgctcctgtgggcccaaaagtggtgtcttagagtaggctggctaatgttaaattccaaacaaaagacaccactgcccatcagagcaagatgccaaagggcaaatctatcctttcccaatggtcactcccacagcctacagcggcatgttcatttagcgtgacacagttcgtgtgaaatgcccctgcagagcccctggggcttgctgtcatcccttagtggtaaggcactcctaagcctccacagtggtaaggcagcctcctaagtcaagtgaggcttctgtttgcctccagagctcaaacatgcacttgggagtgtctcatcgtcaggggtgcccaaacacaacccagggctttcaaagccttcccatggtttgagcagtgaccagaggggcagggactccccacgcctcatctgtgtccaggaagaatacttgcctccattctttctcttctgttcctcctcggcctccttttggatttcctcaatcagcttttcatcatcttcctagaacaaaagcaacatcaaggggcaagtaagcccgcagctccgtgcagtgggctatgggctgaaggtaatgtatcattacagcccatttccatctcctgcactctcttccctcaccagctgcctggccttccaatgaggagggctctgtgctggaaaggtctgtgttcgggctttcagagctgcacaaaagtggagggcagacgacagctgagctaaaagcctgaggcatttctgatctccaaactgcagcttggcacagcaggcttttggacccacctctctgaatacaggtaggccctaaggactggaagctgtctgtggctccaagtggtgtccctgcagcaaaggtgtggccttggtaggacagaaagagaggtattttgcatatccatcacccatgtttgcttcatctcactccgagtagcctgcaaagtggttctccagttcacagtgagacaaaaagactctttatggttagggctgggtgtggcggtgcatgtcttctttaatctctgcccttgggaggcagaggcatgaggatctctgtgaggtttgtgaaggctacatagtgagaccctatcttaagaaaccaaaagaggggctggagagatggttcagcagttaagagcactgactgtgcttccagaggtcctgagttcaattcccagtgacacatggtggcttacaaccatctgtaatgggatctgatgccttcttctggtatatctgaggacagctacagtgtgatggaaccccaccaagatgggggtggtggtccatcagaagcaggctatggccctacagcagaccttgacacatcagctgaactgactgaaagtatggctctgattgcagccagctcttgggaagtagaggtgggagtcctgggagtcctgggcttgcctggctacctagtcagatactaaccaggcccagtgtgtgtgggggtgcttgcctgcaaacacaatacttgagaggtagaggaaagatcagtttaaagtcatccttggttatttagcaagttcaaggccatcttgggctacatgagaccttgtctcaaaaatgtccaatattgtccaatatggggatgagggcaagtttcagtcaccaaacacttgattctctagactaagtcacccaccctacaatgttgggtttctctcatttttcaagagagggtcctactctgtagttcatgctggtttggtacttgtggctctcctgcctcagccacctaagtgcaagtgtcactagtgtcctaatgctcaacccgagacccaggaatggtctgagatgaacaagaggctacagagcagctgtgaatgacaaagacctggacctggagcgattgttggagaagtctgtgcatctgctttgcaggtgactcagatcacagccacacagtaatcagtgatcttaccacatggctatcatgtcccctggtcaggaatttcattagacagatgtgtaccacatgctgctatgacacactactgctaagcccacctctgaactttagacccacaagatagaaagctacccagatggagtgtgtcactatgcagcactcccttgctgtgataaaggactttagaggagggctgttagagatggttctgggcttcagctgccaagtgacagattcggtcgaaatgatccaaattaagctttctgtgacacagggaactctagctgcttatctcagtgtgccactagtcacacctggccaggcgttcagacaaaggaaggaacaaaagttcagttctcatcaagcattttagaaattgtgaaataatgcccacgtccactgtctgggaggagtactgtggacccatagacatctgctaggtgatgcataaaattctctttatgacccagcacttgggaggccagcctggtctacagaatgagttccaggacagccagggctatacagagaaaccctgtctcaaaaaccaaaaaaaacccacaaaaaaacaactcaacccccctcccataaaacccccaaacaaacaaacaaacaaacaacccaactctatatgtggttgctgaagttctgggtggcttttaatctgagcactagggaggcagaggcaggtgcagtgagttcctgggacaatcaggaccacacagagaaaccatactcaaaagtcacacttaggaggctggtgcagggattagacaggcaaggcaagagctcactgtaggaaatggtgggacatagactttagagacataaaaaaaaagggtacagactgggacatgcctttaatacatatcccagtgggtgtttaaagcttctatctatctatctatctatctatctatctatctatctatctatctatctatctatctattttttcgagacagggtttctctgtatagccctggctgtcctggaactcactttggagaccaggctggcctcgaactcagaaatctgcctgcctctgcctcccgagtgctgggattaaaggcatgcgccaccacacctggctaactttcatttatttttgagacagggtttctctatgttgctctggttatcctggaacttgctctgtagttttttatgctggtttctgcctcctgataggactaaaggtgtgacctaccatgccaagctttaacagattattcttattttatatgtctgagtgttttacctgcatacatttctgttatcatatttcatatcacatcatatcatatcaatcatatcatatcatatcatatcatatcatatcatatcatatcatgtctgttgcctaaagaggtcagaaggggcattaggtccccctggaaccagagttacaggtggctgtgagctgccacgtggtttctgggaatcaaacccaggtcctctggaagagcagccagtgctcttaatgttaatgaacactgagttatctctctagctctcagtggcttttttttccttgagacaagttgtagcccaggctggccttaccctcatctcaacctcctgagtgttgggattataactgagctaccattcaagcctctgtgtggcttcttcagtttaagcaagaggtttccccactgaccatttagtaatgtgaatggtagtactgaatcaccatccttcatccctgtacgcctaagtgtggtgccgcctgtacttcctagggcgacagctaaggcctctaatggtacatacagtacttagaaatcacacactccaggtctgggtgtgatctagtatagcgataagcccagcactttggacgtggaggtaggataatcagagttcagagtcatcttcagctacacagtaaatccaagactaaccttggttatacaacaccctagctttaaacaatcccctgcctccccattcattctcatttctttagagcggagactgaggtcccagagtgagtgagctgctcatgcctggttgggtaaggtggactaggaagaacatcaagttaaggaatgccgaatgtcccagtgtcctccaggtctacaatgcttaagggcagggttacttgccttctccccttagcctgtgaaccagttcgtgtacaccgtgcattgtcctgaaaggtataggaaaggtgaggacagaagcagtctggtcccttacaggaccaacacatctcaatcctgagcacaggttatagctggcttttcaccctggacttctgctatggaatttcagagcagggaagactggttgcccaccttggctccccagagtcctattttaattaggaagagtaatatagctggccttccagatccatgaatttaaagcatttgggagagaacccagcatctgttcagaacaaggcagagcctgaacacagcacctctgactttgtctagacagaaccttgtgtctatggaggatggctggaacagatacaaggtctaggctgcttatgaagacacctgcatgctgctgtctgcctcaggtccacctcaggcttcctgtggccaggccacagtaatggactaatactgtggggtgcctttcttcctcttccttctgcatagccctagccagggagcgagccgttctcgacccaagcccagcttgctgatcacgagtccttcccgagcacgggaagcagtcacccagcctttcctctcactccttcttttgctttgatcactccctgaggggccaaggtccttaaggccactcgccctcaatcagtctgggagtctgcagatgaccttggcgtctatgccagtccctgctaccaaaatgatggggctcatgtatgatttatgaggaatcatgagtaaattgctggtcaggcagctgagatctcagctatgagcaaggcatggggcacagacctgcgatccccacccagatggggaaagtctgtgagttccaggggcaaaaacaaacaaacaaacaactccgagcaaagggctgcatcagatggcttttgctgtgttaacaactttaaaaggatttctttttaaacagaaaaagcctccgttcagccagtctgtgtattctggtcacttcccacttctctgggtggagggtccctacccagcaatctcccttcagcttaagttcctcaggctaaggcaggctgggcagacagacaattttacctaatatccactttatcacaactgaagaaaaatctgtactgttcaaaaggagggagggctggggtttagggtttatttgtgccctttgatctgtaaacagaaggatctctggaggccctaggggacagtctaggccacctgagtgagggacgatggaaaagggcttgctatggcactgctggaaataggaacaataggcggaaagaggatgacaggctgggaatgagcaggatcacaggtcagtcctcaagttctttaggctgagtcacttacaggaagctggagtctggccatagccacagggttcagtagtggatatggctacaagagctacaattttggggctccagctccaggttggggtctagccctaatcccatgccaagcctgttttttcagaaaattgttgtgccaaagaagtgaagggctctgtgatggctaattctggttgtcaacttgcttcacctgggaagagggactttcacttgaagaatcacctccatcagccctgtcacaggcaaatacgctttacaagtgaggggtctacttcattcagactccgccttgctctgaaaagatgctgtttttcctgctcacaaatttccttcctcttggttggctgagttaccggacacagtatacactggggcacaagcttctcttactcagtttggctcacagcacccatggtgggaggagagagaggctcataagcacctgtaacccagactcacagactcttgatgcctgcggccctgaacacatgagtgtacacacacacacacacacacacacacagaaaaataaaagggatggctcagtggtttgaaagcactagctgcccttacagatgctgttctcagcatccacatggcagctcacaaccatctgtaactctggttccaggagattcactgagtgtagtggacagcaagcacatgtgtacccacccagtcaaacacacaaaataaagataaattaacaaaacaaaacaaaacaaaaaggccaggcaatggcagtacacacctttaatcttagcactctggaggcagaggcaaggaggatctctgagcttgaggccagcctgctctacatagctggtttcaggttctatagtgagatcctatctcaagtaacctttaaaatagtatcacatataaagccgggtatatgcctttaatcctagcacttgggaggcgatggatttccaagttcaaggccagcctggtctacagagtgagttccaggacagccagggctacacagagaaaccctgtctcgaaaaaccaaaaaaaaaaaaaaaaaagcatattctatatatttgttgagtgcagtagtacatggtttaaccctacactgggaggcagaggcaggtgaatctctaagattttgaggtcagcatgatatacatagtgagttcaaggccagttcaaagtcacacagtgagtccttgtattaaaataaattaagtaaataaataaataatcaaaggaaaaaaaaaaaagaaagcattaaagcatatatgcccacaggttaacctgatggaggcagttccatagttgcgggtccctccctctccccaggtgtgctaaattgacaatcaccatcagtcatcagagtcccttcaaaagaacaggctggggagtgagtgagaactagatccacgcctgggtctgtagccccaagcgaaaggtcccctagtctaggtctggtttatagtaacaaacacaactgctgaggtggagagtctagctcaatggcagaatgttgtacggaatgatcaaggtcctgggtgtaatctccagcacagaaaatacaaataaaacccaacaaaccagcaaacaaagaaacaaaaacacttaccagacataattaactcctaagaacattctggtatatttctaatgtttcccccctctttttctggcttgactttgaaaattctagacttcacactggaaggccactttccgccatggcttctattctcacacagggactagcagggtcagtcagagggcactcagacttacagaccccagtgctccaccggtcctcaggctatcttgaaacccacccccaacctgtctgccgtggtcacaggccacagtggggaggagtctggcaatgctctctctggctcctgggctatagaagcatgctataggcctgaagaagtttgtctgtgttcttttctgaagagaaaagatagggaggtcgggggagactggccagtgttaaggagagggtgaggacataccaggctgtcatggaagtgaattatgaagtgcctctttgacacctacagctatcttaagaaacaagccttcagctcacctgaattcgatgacaatggggaaggaagtgcgggaagcaccccagggttggcagggcaaaggtgaaagtgaaatgtggcccctcacatccagcaggccccgtacttgcagtagagagaagcagggcggggaggttttagttcccatccttgaggtctctgagctcagcaggacacagaaggcaccaggagaggctacagggctggccggtggtgggtggggagttgcggccagagtttgagggagaaagcagggcctagcagttctagaatttcacaggaagtgaggaagaagtcaccagagtagttttcattaagagcggaaatgcagagacatctgcttgtccctgaaccacaagcaccacagctgtccatgcagcggggtctgcacaaagaaactgcaggtagtggagcggaggcagaggctgtgcctgcaggtcagacacagcttgtgggttaaaatacatgcctgagtacctggcacaagaccttccctcccaagaccctatgagcccaaaccccagtctgatttctcattacctgcttgcctgctggccaggctcctgtgacttggcttgactttccttccccctagaaagatgacaggcaagcaagcctgctgctgcccgacccagccccttcccccatgattctgctcttgtgtggccacagctgttgttaataaacttgcaaggatttcgtgaaagcttccaaagagctagagatttagtttcaaattattcccagctcagttgcgggactgcatgagaacagcagcccctaacccccaccccagctgtctcccgacaacaggaaattgggatgtgtggggggagcagcatggaggggaaaacccagctagggaggcacatgctgtgcagagggaaacagaaatgttctgggaggagcaaagattacacaggctccagaccagcctctagtttcagcagccatcttcttaagtcaggaagccaagcatcccaatgcctctgaccagggcacctcctccacaaggacctctagtgtccagcggtccatcaaggaggcagagctgcaggcctctcctgccgtcagcagtctgctcagctgagaaggtgttcagtgagccccccaccccacgggaaggtctacttggctcacaggactgagacccatgggcacatcttggccatctagttgtggaaagccttatgaacagaagagctgggcgttaccaagtccaggatcctggacagttttcctaatttcctaatctgcaaaaatgtgtcccccccccccccccccccgtcatgtcctcagccgaagtcccatttaacattccaaaagcactgtactgtgagggaagtttcatcagtgtacccattctacccatgctcctctttgtattgttctacagaaacaatggggctgaagatagtgagcagaaataaaagtcagagctgatgactacaagttcttgttgttgtcttttttttttttttttttttgagacagggtcttctagaacttgctatatagactaggctggcccagaactcaggaaaaaaaaaatcacctgcctctgcattcccagtgccacaatacacagcccgaaggttttgagacggacatgaaggctgactgctatttcagtaagcggtttcaatactgcagaggacacacaacagcagggtgaggccctgaggagagaggaaaatctcttctctgacattttacaggaagggggaactctgctgttttgttttgttttgttttttttccagacagtctctctgtgtagccttggctgtcctggaatttgtctttggactagggaggcagcaacaggtgaatttctgtgagtttgaggtagacctggtctacacagcaagttccacgatgactctgtctcaaaacaaaactaaaacaaacaggcatggccctggttaaccgtgactactgttctaagggggtgcaagggaatgtcacttttcttttttctgaggcaaggactttatatagcccaggctgcccttgagctcactacggagccaacgatgaccctgatcatctcatcttttagtctccatttgaatcctgcagctgatggtagatgcatgtaccaccacgctcgctcagttctgaagagaacagcgagggtttcacatctgctaggtaagttctctaccaattaccattctaagcctttttatttttgtagaaaataaaatttaaaagttaggggaaaatgatgaggcgctagagatggccttgaggtttagagtgcttagtttctgtagaagactgaggttcagttcctagtacactcgtgacgttcttgtaaccctcctgtaagtccagtacagaccagctgaccagggcagtggtgccggctggtgaggtgaagcattagtttatccaggtgtaagcatgggagagctcctcgctagcttctcctttttcttttcaatccccttgagtctactcccacagccttcactattcctgcaggcaccccccaccccgcccctttctgaaggactactaggaccagagtttccaggatgctgcaggccctgaggggagaaggcagacctgaatgagcccaagagacctggggtgctgctgtttgtgaagctgggcactgcacgcacgcacgcacgcacgcacgcaccacagcactaagccaggagctggcaggaaagctagtgctttctcagaatagcctccaaacacaaattcattctcaaagaagcctggtgtgatggctcacacctgccatcccagcacttggggaatgaggcaggaggactgtcaaacgagaccctgtttcaaaagacaaaaccccaaactaaaagcaaagaagagttcaggatgtagcttagaggtaaagtgctagcttggcaggcctcaggccttggattctatctccagcactagaaaacaccatcaccaaagaacaaactcctaaccccagacccaagaaaaaacctgactttgtgatttttctaagacagtggtctcactatgtcgcttaggtcagcctccaactcatggtgatccttctctgtctccccagtgctgagatcacacgcctgactcttaaaatcgattttcattacaaatataataacaattattattattattattatttttgtttttttcgagacagggtttctctatatagctctggctgtcctggaactcactctgtagaccaggctggcctcgaactcagaaatccacctgcgtctgcctcccgagtgctgggattaaaggtgtgcaccaccacgcccggctataacaattacttttacaaaaaacttccctttttcctttccctttcctttcctttctcctttgctttttcctttcccttttccctttccctttctccctttcctttttcctttttccttttttccctttccctttcctttccttttcttctttgagaaatggtcttattcctggccagcctcaactcagagagatttgcccgcctctgccttctgagagatgggattatacatatgtgttaccatgccacgtcttaattattaatttttatttattttctttggctttttcgaggggtggagtgggtggtactctgaactaaacccagggacttccacatgctaggcaaccacggagctacaccccaagctcacattggtatttaaagtgcatgtcatcaacctcaccattcctgtagaatgcagcctgccaagtgatgatgctcatgtgaacacagctctagtcagatactgcttcctggtcttggctgcctcattctcagccatgtgcagacaagcagaatcaactccgcgcttcagttctgcccctgaattgcccactgcagagcaatacttgctcatccccgtcctgggcagccctggggtttgaatgcacagcctcggaggacaacatgctatacaagcactgtacactgagctgccccttggcctgtgtagcatgtctgttttcccttcttcctaaagaaggcagtttgcttcatgacttgtttctggcatactcgctgcaaggtatttgtggtagcaaacagagaaagagctattattcaccatctaagcccttagcacagagtccattcaggctcccagaccacctctagtcattaagggctcaaacttctcttcaccccaagctgtgtagaaacaattccctgctgacaatttgtgggaagccgcccccacattcgccgtcacaagatggcgctgacatcctgtgttctaagttggtaaacaaataatctgcgcatgagccaagggtatttacgactacttgtactctgtttttcccgtgaacgtcagctcggccatgggctgcagccaatcagggagtgatgcgccctaggcaatggttgttctctttaaaatagaaggggtttcgtttttctcgctctcttgcttccctctcttgcttcttacactctggcccgataaagatataagcaataaagctttgccgtagaagattctggttgttgtgttcttcctggccggtcgtgagaacgcgtcgaataacaattggtgccgaattccgggacgagaaaatccgggacgagaaaaaactccggactggcgcaggagggatacctcattccagaaccagaactgcgaatcaaggttataaggttcccgtaacacagactgttgagaaggattcaactgccgaattcagaactcatcagctggggaacgacggtgataaaggttcccgtaaagcagactgttaagaaggattcaactgtatgaattcagaacttttcagctggggaacgaggtaagtctgatcttgaactttctaacgaaattcaggacagtctatcagaagtaaagtggaaaatggctttacgaggtatgcttggccttaaactttctctagtgttagaagcccttttgttccttttcacatgttatcaagtgattaaggcagggctaaaaattctagatgaaattcaggacaatctatcagaagtaaagcggggagagagagtaggagcaaagagaaaatatggttcacaaaataagtatacaggcctttccaagggtcttgaacctgaggaaaagtttaggtcaggtaagaatacctggggagagattagaaggaaggagaaggaaaaagaaaagaaaaaagatcaatcagcggaggcttctaagagaaggagcctatactcatcactagatgagctcaaggagccagtttttagtagttctgaatcaaatgaaaaggctattagggcctggaaggcgctctcccgagcaggtgaagccactggacaataatgacagaggcaggctcttgcagcctacaaggtcttattgtctaccctggagttgtagatcagaattgtaaaggggaacttcaggttctctgttcttgtcctcaagttgtcttttctatatcacaaagggacagaatagctcaactaataataattttgccaagcctacatggctgttttttcttcttctggtattccttgagctgccagagggattggttctactgaaagtgattctgattacttaataatgcctttagattgttgtcaaattttatctactcacgtaggggtaaaccctcgtggcgtcaggccattacaggtctgacagatggatgtcacgcatatttcctcctttgagagaaatcaatatttacatgtttagataagaagagatcacctccataccttaaatgattttcaaaagctgttgggagatattaattggctcagaccttttttaaagattccttccgctgaattaaggcctttgtttagtattttagaaggagatcctcatatctcctcccctaggactcttactctagctgctaaccaggccttacaaaaagtggaaaaagccttacagaatgcacaattacaacgtattgaggattcgcagcctttcagtttgtgtgtctttaagacagcacaattgccaactgcagttttgtggcaaaatgggccattgttgtggatccatccaaacgtatccccagctaaaataatagattggtatcctgatgcaattgcacagcttgcccttaaaggcctaaaagcagcaatcacccactttgggcaaagtccatatcttttaattgtaccttataccgctgcacaggttcaaaccttggcagccgcatctaatgattgggcagttttagttacctccttttcaggaaaaatagataaccattatccaaagcatccaatcttacagtttgcccaaaatcaatctgttgtgtttccacaaataacagtaagaaacccacttaaaaatgggattgtggtatatactgatggatcaaaaactggcataggtgcctatgtggctaatggtaaagtggtatccaaacaatataatgaaaattcacctcaagtggtagaatgtttagtggtcttagaagttttaaaaacctttttagaaccccttaatattgtgtcagattcctgttatgtggtaaatgcagtaaatcttttagaagtggctggagtgattaagccttccagtagagttgccaatatttttcagcagatacaattagttttgttatctagaagatctcctgtttatattactcatgttagagcccattcaggcctacctggccccatggctctgggaaatgatttggcagataaggccactaaagtggtggctgctgccctatcatccccggtagaggctgcaagaaattttcataacaattttcatgtgacggctgaaacattacgcagtcgtttctccttgacaagaaaagaagcccgtgacattgttactcaatgtcaaagctgctgtgagttcttgccagttcctcatgtgggaattaacccacgcggtattcgacctctacaggtctggcaaatggatgttacacatgtttcttcctttggaaaacttcaatatctccatgtgtccattgacacatgttctggcatcatgtttgcttctccgttaactggagaaaaagcctcacatgtgattcaacattgtcttgaggcatggagtgcttgggggaaacccagactccttaagactgataatggaccagcttatacgtcccaaaaatttcagcagttctgccgtcagatggacgtaacccacctgactggacttccatacaaccctcaaggacagggtattgttgagcgtgcgcatcgcaccctcaaagcctatcttataaaacagaagaggggaacttttgaggagactgtaccccgagcaccaagagtgtcggtgtctttggcactctttacactcaattttttaaatattgatgctcatggccatactgcggctgaacgtcattgttcagagccagataggcccaatgagatggttaaatggaaaaatgtccttgataataaatggtatggcccggatcctatcttgataagatccaggggagctatctgtgttttcccacagaatgaagacaacccattttgggtaccagaaagactcacccgaaaaatccagactgaccaagggaatactaatgtccctcgtcttggtgatgtccagggcgtcaataataaagagagagcagcgttgggggataatgtcgacatttccactcccaatgacggtgatgtataatgctcaagtattctcctgcttttttaccactaactgggaactgggtttggccttaattcagacagccttggttctgtctggacaggtccagatgactgacaccattaacactttgtcagcctcagtgactacagtcatagataaacaggcctcagctaatgtcaagatacagagaggtctcatgctggttaatcaactcatagatcttgtccagatacaactagatgtattatgacaaataactcagcagggatgtgaacaaaagtttccgggattgtgtgttatttccattcagtatgttaaatttactagggcagctaatttgtcaaaaagtctttttcagtatatgttacagatccttcgagaattgagacttcaggtcaactccacgcgcttggacctgtcgctgaccaaaggattacccaattggatctcctcagcattttctttctttaaaaaattgggtgggattaatattatttggagatacacgttgctgtggattagtgttgcttctttgattggtctgtaagcttaaggcccaaactaagagagacaaggtggttattgcccaggcgcttgcaggactagaacatggagcttcccctgatatatctatgcttaagcaataggtcgctggccactcagctcttatatctcacgaggctagtctcattgcacgagatagagtgagtgtgcttcagcagcccgagagagttgcaaggctaagcactgcagtagaagggctctgcggcacatatgagcctattctagggagacatgtcatctttcatgaaggttcagtgtcctagttcccttcccccaggcaaaacgacacgggagcaggtcagggttgctctgggtaaaagcctgtaagcctaagagctaatcctgtacatggctcctttacctacacactggggatttgacctctatctccactctcattaatatgggtggcctatttgctcttattaaaagaaaaagggggaactgtgggaagccgcccccacattcgccgtcacaagatggcgctgacatcctgtgttctaagttggtaaacaaataatctgcgcatgagccaagggtatttacgactacttgtactctgtttttcccgtgaacgtcagctcggccatgggctgcagccaatcagggagtgatgcgccctaggcaatggttgttctctttaaaatagaaggggtttcgtttttctcgctctcttgcttccctctcttgcttcttacactctggcccgataaagatataagcaataaagctttgccgtagaagattctggttgttgtgttcttcctggccggtcgtgagaacgcgtcgaataacaacaattcgagcttcttcctggcctgctggttaatgaagcagaggtcgggagcaggacagtgcaagctttgtctctggcaagtctgaatggctttgtgttctcagaggactcagcagatgctgggttggatttcaatccgtctcctggtgagaatcaaggaaaccaggctgatgcctggtttgatgggaatgggacaagtggaacaaaatctccaccatggtcccgaggaaatcagagggactgctatttgcctgaccttcttttcaggctacaaagtcttcctcaggctacaagatggcacttcaacaaaaaaaccaaggacaggtacctgctatggcaggcagacaggatttcatgtaggggaagaggaggcatgggggagagagcaagctcagcccaggctgctaaactcccgacctcatgtggcaatgcccactgtgctgtttctagggataagtgggggtctcgaaagggcctagcttaggaaaaagactccatttcctcctgaacccgtagagatgcaagctagacagacaatgacaggagctggcagaatgattaggccatatcaaaggacctaaagtatctgagacatacctcctctctcctttcccttgtaggctgcctccccataactagcaatttaggaaaattacactttctacacacaaaccctctactctgttccatagacccccttggagacacctccctgctagagggctcattgggtgctgagctgcatgaccagctaattccttcaacttagcactggcacaatgggccataggaacctgctcctgacaaagcactgctgattgatgcagggacgcctggcacccagagcatcacagctttcccactgtggtggctctgagcaagcttttttcttttatgtatgatgagcacagtatagctgtcctcagacacaccagaagagggtgtcagatcccattacagatggttatgagccaccatgtggttgctgggaattgaactcaggacttgtggaagagcagtcagtacttttaactgctgagccatctctccagcctgagaattttttaacatagattcaagccagcctttaagacaccctatccatgaccacagagtggccaatagtgacctgactgcttcctgtggtatgtatgctgtacatttccacaccagagatagaaaaaggcctttgctttgggtgacaggatgctggttgagagttttcaagatactttagtaaatgccagtttttaaaaccaggaagactctacactaaggcacagattttcagctctgggagctgggagctgcggcaattctaagcagcctgaggtaaccagcagcagtaagtgccagttgaaagcagcccctgttaactaacgggccacacccttaccacgccatgctggcaatcctcagtcctggccttgtggcaatggtctgtggtcccggctatccataactcttcttctacacatcatcctttcacattattttccatatttggagaaaactgacatacatactgcatcttgggggtcttattctaatctgagcatatataaaatatggcatacatcttgtttcggagcatttaaaaactgtggttctaaatgcaccatctttgaacaagtagcacacagcagctctgtagccctccagcactgatgagctgcttatcatctgaaatccaaacgtctgctcggccggccgggaacatgcttaagcaagatgattgcaagttaagctctaggccacacaggtagcacagcgagaaaccatctcaacaacaacctcctctgtacaaagctgtccccacgaaggttatgtgaattcagtgtgcacagctggcagctttgcacaagtttttctgcttcctgtaactctgctttcttacctatctctccccatggaagtaaacagagttaactcactagcaaaacatttgtctcccagagcaaggggagattagctgagagtagctaaagtcataaccaacctttgttatttgtattttattattgttattactgctatttttcactgtgtgcatgacacgcgtggaagtcagaggccagcttgatggagctgtttttcttcttctaccacacggctcctggatcaaactcaggttatcaggctcagcagcagggttcctttacccaccaagccatctcactagaccatttcacactatttttaggcttgctgttacttagagcttaaaatacttacatatatgtgtggcttgcatatatgtctgtgtactacactagctcctggtgcctagggagtccaaaggaggaaggcagatagattccctggaactggagttacagatggttgtgaccttctgcaagagcatcaaatgctcttaattgctgagccatttctccagctccaatgttgataattcttttaaaaaaacttttagcatttatggcatatggctgttttgactacatgtatgtatgggcatcacatgtggcctctctgggactgagttatagatggctgtaagtcatcgtgcgggtgctgggtcctccagaagagaagccagtgctcttagatactgagctatctctctaattccccttttctcccttctctgagacagggcttctttgagttacagtcctggaactcactgtgtggatcaggatggcttaaaactcacagagatctgcctgcctcttcttcccaagtgctggaattaaaggcatgagctaccaactgtccggctaataattttttaatattacaacatttattgattgactaagtcattttactctagagaagaacatgttggtgaattgcctaagctgtaagaatttccctattttagtttgtgattattatctgtgtgtgtatgtgtggtgtgcaggtcagttttcccccctccaccttttggtaggttctagggactgaattttgtgcagcacaatctttccccattaactatctcattggctctctttcagtttttcatttctcttgtatatagtcttctgccaaagataatttacatttcctttaaaaaaaaatctattcacttatttgtatgtgtgtgccccagggcatgtgtgaaggttagtggataacctggggagttggttctgtctgttatttttcttattctgcttctaagcaggatatttaaagttacccattggtttcccagaggtgcttcttacagtctggacaggcattccgtacgagctgtaaacctcccaccctaatagtagacaacgtgatctgtcacactatgcagtgctccagtggcactcagacttgccacagttcagaacctcggagccactccggccctgtctctgggcccccaaaggctaaatctggtggtcctgtacctcttctatgcccctgtagctttcgctacactactgggtcactctgactagtctgaaactactaaaatcacgaagcactgtttcatactatattagggcatttctgctcaacagattggttttgcctccatttcctagtttaaaacgaagcaatggagcctgcagacatgcctccgtggttaagagtgccttttactctggtacatgattgggattcagcccctcgtactgacatggtggctcacaaggatgtggcactccagttgcaggggatctaacacgttcttctggccttggcagacagacaccaagcacagaagtgtacatacatctatgcaggaaaccataaaataaagataataataaaaagagagaatgagccgagcgtggtggcacatgtctttaatcccagcactcgggaggcagaggcaggcggatttctgagttcgaggccagcctggtctacagagtgagttccaggacagcaagaattacaaagagaaaccctgtctcaaaaaccaaaagagagaatgaagaaatggctcacatctataatcctagctcttgagaagctgatgaataactgtgtcatcacttcagtaatacaacatgctttgctttgttgttttgagataggctcttatatagcccagactcttacctcagcctcctaagtgctaggattataactgctgtagctgctacctggttttttctttcttttttcttttttttggtttttcgagacagggtttctctgtgtagccctggctgtcctggaactcactctgtagaccaggctgacctcgaactcagaaatccgcctgcctctgtctcccgagtgctgggattaaaggcttgcgccaccacgcctggcatctttcttttttctttatagacaggatcattttattttaaaaaagatttccttactttatgtgtttgcttgttttgtctacatgtatgtttgtgtaccataggtgtggcgtgtcctccaaggccacagatggtatagaaacctctagagctggagttccaggaggtagtgagccaacactgggtgctgggcatggaccacaagtcctctgaagagtaaccagtgatcctacctgcagtgccacctctccagtctccctgtgatacagagttggtctcatacagcctaagaggtcctggaacctgtgtgtaattgaagatggccttcaacttctgatttcctttgacttcttctttgatgggagtatagatgctgaccaacactagtaaatctctccttcccagcccccaacccctctcccctggaccaggtttctctgtatagcacccttggctgacctagaacttgctttgtataccaggctggccttgaagtcatacacatctgcctgcattgcctccctgagtactgggatttgcatgcctggcattattaaaagttttaaaaatgattttgtgtatgattgttttgcctgcatttgtatctgtaaactgtgtgtgttcctgatgcccacaaaagtcagaaggatgcatgggatcccctgactggagccagggacggctataagcaaccatgtgggtgctggaaactgaacaggcactctgcaagagcagcacacgctcactgctgagccatctctctagcaccctattgttgttgttgctgttattttattagacagggtttctctgtatagttggttttctcaagttcctggctgtcctgaaacttgctttgtagaccaggctggttttgaacttaagagagccacctacctgcctctgcttcctaagaattgagattaaaggtgtgtgctaaactgggcgtggtggtgcacgcctttaatcccagtactcgggaggcagaggcaggcagatttctgagttcgaggacagcctggtctatagagtgagttccaggacagccagggctacacagagaaaccctgtctcgaaaaaccaaaaaggtgtgtgctacttctgccacccggctttttagtattcttttgtggtttgggagatttaatgcagggtctcttgcatgctaggcatgtgctctaataatggtatttttcaaagtttaaatcaagagtgaaggttttgagtcccttcagtctgttaacatctaactgcatcagtatggtgaattacattaagaaggctgctaatattaaactacccttgcctttctacaatatactgtatcctagaattacaacatgtttatttggcttttctttccttgaaaagattgttgggatagggtccccctacctagcccaggttggccttaaacttgtaaccctcctgtctcatcctctgagtgctgagattagaggcatgcagtcgtgtttgtctgtaggctccccagaactctgtagcactctgtgcagtgaaagctgttgggttttggtggcagcagtgtgttgtctataactctcccttgtcctgtataacactccagatggcagagaaaatgtttatcccctaagtgactgaagtgatttgtccacaagacttttttctttttttgagatggggtcaccctctcttgcttagtgattctcctaccccagcctcctgataatggctacaaggcatgtccaccacactcagtgtatttcaaggtgagtgttttctgatattctccgttttccctgtggctattggtttgtatgtttctatgagtctgaacctgtcacgtaaatacaaagtacttttcattacaggaatgtattgctcttttctcatatatggaaatggactgacacgcatctactcacagtggggtcggtccacagggagcacctggaacattcttggcaaggggctcctggagagcgaggatgctggcagaaatggtcatagccattgatagaaactcgacagaggtagcacatctgggcaccacagcggcaagacatgcggttgcagccttcagacttgatgaggccagttccacacttgtgacattttctaatccgagcagcagtcattttttcttcactgagaagaaaagaaaaaagcaattggagttggcagggaaggtggggccaataaatgatcatggccactaaggtttactatttcccgtatgtaaggacggcctgagcctttccgagacattcagacagtggaaagggcccatgttttggagtctgagaactcggctccaagtttatcaactgtactaccttggataaatttcccaactgcctggagactcagtttcctcactttcaaattgagggcataatattctcatgtagttttggaattcagataagatataaggccatctgacatgatgtgtggcattttttcattctaggactcctgcaggctgtcaagagggagaagaaactcggctccttcctaaaccaaacctggtctgtgcaaagctagtgatttaagaagtgggagccaagtctatatacactggatctctgaatacttggtctgggagtaggcaatccctctgttgaaggagcacacgtccaagctcacactcctacagtcccccaatagcgagactgtttctagaagcatttcaactgataaggagggcccactactgccaggatacttcttactgtgttggtattttgtattgctgctcccaactacaaaccgacacccttcacctttctctgttacactgagggccttgaagacagagggaagggaggcaggatcaaaacaaatttgctattgagataaagggtgggtggccagctacaaagtgaagcagagagggtgtccagcaggatgtgctgcgatgtaaaggtgagtgcaatctaggcagcaaatgctttcactgtgtgcactgcagctactcacactgcagcagtttgtcacttagacaccaaactatgtaccaagaacagtaaaatgcaatataacactggctgctacttattgaggtccaatctgctagtgacctgaaatgaagaaaagcagaactttagcttggaaacaatctacacccagttcaagttacagaagaacaaatgatttctaagttttgtttaataggagaccaagtttaactaattaatcttttgaatcagggtgtcacaaagcctaggctggcctggagctcaccacttgactaggctgaccttgaaatcagagagatccatctgtgtctgcctcctgaactgggacccagtgtgtccaggagactagactctattactactgccggctgggagtagcacaatgagtttagttactgagcaactgtgaagacacttctttttttttttttggttttttgagacagggtttcccgtatagctctatagctctggctgtcctggaactcactctgtagaccaggctgtcctcgaactcagaaatccgcctgcctctgcctcctgagtgctgggattaaaggcatgtaccaccacgcccggctcatgaagacacttcttaatgttgcttcttaagatgcaaggagctgctgggtggtggcggcacacacccttaaccccagcacttgggagttcaaggccagcctggtctacagattgaattgtaggatagccaggaccatacaaagaaaccctgtcctgaaaaacctccaccaccaccaccaccacaacaaaaacaaaacagaaaaggccagaatgggcctatataagaaaggactgcggctgtatggaacagagaagccacagctgctttttgttgttagcgtgaactatacaggaaagagcctcacaggatgtgcttccagaagcaggacaggaagagaagcctaagccgaggctgtctctgtctgctgatctcatgttcaacaggaagactcatggacatcctctgtgcagccagctgacaccccaccagtctgtcactactcgtgctttactccccaaagacaacgggaagtaatcttgggggcttccttctctctccactctccacaccttctcttcccaaccaaaaacatactctgcagtactggctggtctggaactccctatgtagacaagcctgatttc

SEQ ID NO: 4 - DNA, 192018 bp, Mus musculus
gaaatatggtgtgggatttgtgcacagaacagcaaatagattattaacaaagcagagcagggccagaaacttattcacaggatggagaaagatacatcctgtacatggcggccatgagaaagctatagtggccaaagaaaactgccgtggagatgctaatttcagctgaataaaacaccatggaaagaatagtggcttgtgcctctggtcccagctagggagggtaaggctggaccgttgctggtatttagggcatctaaagaagaccccctcagctcaaacaacaacatcaaaacttgagaagaatattgtatatttttaaccaggctggcaggaaggaggatgttctaaagaaacacttgtgcccctcacatcggctatcagaccattgaaacaatgggcctcaagaacttggaatttccttaggagtcacaagctaggagaaggaaagggttgggtgcctggtgccagccagaggaggaactggttttccagtaaaaattatcacacagttctgataacctatgagaccatcctgcaggatgagacaaagccaagacaatggtgaattaatgatgggtgaaactagaccctgcccaagatttcctacttgtgcaaacccacgcctctcgacataaacctcatttcaggtccccaaacataaaattgaggaattattggatctctttgttcctcttaccagtgtgaccacatagaacaaatctccttttatggcttagtctagtttgttagggctgcaaaaacccaggatctgaccctattaattacagtaacatgttaattaaaagtcatccaaaaaaaacctctactggatataaacgtgtatatccaccatgaggtaccaaaatatgtgacatcaaagccaacagacttgatgcaatgacgactttgatatgtataatagatatatgataattaaaaataaggcaaaatgtgtgctgcagcaatggtccagcagttaaaagcatttgttcttgcagttggcccaggttcagttcccagcatttacctggcagttcacaagcgcctggaacagtggatccagagcctcttttgaccacagagagtttctgcatgaacacggtgtgcatatatacactcaggcacacatacaaacacatacaaataaagaaaaatgtaaaagataaaatgcttttgaaaaaattttaacagttatgggagagatgtgttgaggtaaaggtcaaggaaataaaattctttttttttttcagtgctaggattcaaatacaaggccttacagatgctaggcaagcactttaccattaagctacaccattactgtggtttgttttttgttttgggtttttttgtttgtttgtttggtttttggtttttttgttttttgagacagggttactctgtgtagccctggttgtcctggaactcactctgtagaccaggctggcctcgaactcagaaatctgcctgcctctgcctcccaagtgctgggattaaaggcgtgcaccaccactgccccactccattactgtgttttttaaaaagagatttatttatggttattttatatgtatgaacattttgcctgcatgaatgtaagtgcattacatatgtgccttgtgccctcagaagctagaagacattgttagatagcccagaactggagttacaggtggttgcgagtctcctgatacaggtgatggaaatcaaattcagaatctctgaaaaaacagcaagtgcttttaacttctgggtcatctctacagcccgtagcctttaggcttgtttgctgtttgctgtttgtttgtttgtttgtttgggacagttttactccatacctatgtagaccatgctgaccttgaactcagaaacgctcctgactctgattcagaagtgctaggataataggtatgtgccactatacctacatgaaatagaaatcttaatgtgataaatgagtagaagtcattgcaaaaaatcaaaatacacattcttttgaagtgttcttcaagatgtaccatatgctaagtcttgaagtaggatccatttgaaatatatgtaagaagattgaaagcatgcacagtatattctttgatcacaatgaatgaagttaggaaataataacataaggaaattgtaaaatacacaaatgtgtagaaattaaacaacatattcctaagtaaacaatgggacaaagaaaggaaactgtaaaatagtttcagataaatgaaaatgcagacacaatctattaaaatttatgggatatggctaaaagaagatttacaggcaactttataggtataaacacttgctttaaggaaaaaacaagattcagagctagagagattgctcggtggttacgtgtacctgttgctagtgcagaggacatgggtttaattctcagcacctagacagaaggtgactcacaacctcctgtatctctagtttcaagggttctgacatctgtttcgacctctgtgggaatcaggtgcacatgaagcacatacatacgtgtaagcaaaacactcatgtgtataaaatataataaataaaacaagatccaggggccagatgaggtggtgcccatctttaattccagcacttgggaggcaggggcaggtgggtctatgagtttgaggccattctggtatgcatactgagttccaagccaggcagggctgtccagtgagattgtctaaaaacaaaacaaaaacacaagcaccacaaccaaaaacaatattcagggctggcaagatggcccaatgggtaggcattcacttctaaagctgtcaccatgagtttgattcccagacacacatggtagaaggaaagcagcaattcctgaatgctgccctctgtcctccatacagtaccactgtggcacgtggtgcacccacatgcccacactaaaatacaataaataagtgtaattttaaaaaatgttcagacttgggagacagagacaggcagatttctgagttcgaggccagcctggtctacaaggtaagtttcaggacagccagggctatacatagaaaccctgtctcgaacccccgcccccaaaaaatgttcaggtgaggatataactgaataagagtgttttgtacatgcgatgcccttggtttgagctacaacaaaaagtaaaactagtgaaaataagaataaaggttcaagaacagaaaaagaatagaaattgacaaaatggagaatagaaaaagaattgagaaaaaaaacaatggagacaaaaaaaatttttgcacagttaaaaaaaaacatgaaaacattggggggaaagtgagaaagctcaatcaataaccccaaaagaagaatcagagagatgaggtcagtctaagggtgtcataaggacaaccaaaatgccagcagatttgatgacttagatggtatagaaaaatgaatagaaagtcacggaccgcttcttcttcttcgggaaaacaccaaatggcggatgacgccggtgcagcgggagggcccggaggacccgggggcccaggattaggaggccgcggcggcttccgcggagggttcggcagcggtcttaggggccgtggtcgtggccgaggccgtggccgtggtcgaggccgcggggctcgtggaggtaaagctgaagacaaggagtggatccccgtcaccaagctgggccgcctggttaaggacatgaagatcaagtccttggaggagatctacctgttctccctgcccattaaggagtctgagatcattgatttcttcctgggtgcatccctaaaggatgaggttctgaaaatcatgccagtgcagaagcagactcgggctggccagcggaccaggttcaaggctttcgtcgctattggggactacaatggtcacgttggtcttggtgttaagtgctccaaggaggttgctactgccatacgaggggccatcatcttggccaagctttccatcgtccctgtgcggagaggctactgggggaacaagattggcaagccccacactgttccatgcaaggtgacaggccgctgtggctctgtgctggtgcgtctcatccctgcccccagaggcactggcattgtctctgctcctgtgcccaagaagctcctgatgatggccggtatagatgactgctacacttcagccagaggctgcactgccaccctgggcaactttgctaaggccacctttgatgccatctccaagacttacagctacctgacccccgacctctggaaagagactgtcttcaccaagtctccttatcaggaattcacggatcatcttgtgaaaacccacaccagagtctctgttcagaggacccaggctccagctgtggctaccacataagggtttttatatgagaaaaataaaagaattaagtctgctgataaaaaaaaaaaaaaaaaaaaagaaagtcacggaccacaactgacagaagaaaaaaatagaagcaaatctaactagacgcagtgattagagactgaatccatttcaaacgtactccaaagagagatgcccaagtagatgttatcggcacccgagaacatcacaaatccctccataatgtagaatctcatttcatgatgctggtatcactctgaaactgaaaccagacaatgacatagaaggaaacgaaggctaaaggtcaataaccctgagaaaatagaaaaaaaaaatatcctcaacaagataaccttcaaactaagcccaggaacctgctaaaaggaataaatacacgcaaccggtgaatttgtcacaggataactgggcaatttgactttcaagattaacttatacagaaacatgtagaattcacaaggatttctatactttttttgagacagggtctcactatgcagctttagcggacctaaaactagctattgagccaggctggtctggcaagatggattagaagattaaatgctcttccctgcaagtgtagtgacctaggtagatccccagaacccacgtgactggcaggagagaatggattccccacaggttgctctctgacctacacataactagctagctagataatagactggaagaagaattacaagttcaaagtcatcctgggctacctaattagtttgaagccatcatatgctacatgaaaccctgtctcaaaaatatacccattatatctaattgtactggcttaagtttcatacatgaatcaatataatattattgggagttcagaaatcaactctcacattgatgaacaattgatttttcactaatgttgccaaatcaattcagtgagtgaaaaaaaaatggtatttacaccaagcagtgctgggacaactggaagtccccaagtgaaagagtacaactgcatcccttccttccctcatgttcaaaatctgacccaaaattgaccactagtctaaaaatacttgaatatgaaataaaaagtttttatcccatcagggtctggggtgcttagagtttaaccagtggtaatacatgtgcctagtatatctggggaccctgggctaaagtgttagttttgccattgttgtgacataatgcctagcaaagtgacaaagctactaaaggaagagtgtattttggttcaatttgagggttcagtttatcaaatcagggaggacgttgtgtcaggttggtcctctcctcctctctgctcccctatctggcacagatttcactgtgtctaatcctggctagcctggaattaattcactatacagaccaggctggccttgaagtcacagagattcatctgtctctgcctccccaggcctgggattaaaaacatgtgccaccaaatttcgttgctttctccttttaattcagtccaggacctcagcccatagagcagaactgcccatggttacagaagggctttctacctcaatctcaaaacacccttgtagcttgccaagagttttgtgccctcaatgattattgatgctatcaagttgacaatcaatattggccatcacaacaaacaggttttcagacttacaggaattattttacagatcgtccaaaaaagtctgttcttaggtaccttcatattacttttaatcgatcagttatttgcctaatagcttttctgattctgtaaattcatcatacaattttattcatatattgaatcctatcatgtttgaagtccacaaattacttccaatgaaaccataagtgaactttctcttttaattagagaaaccatgtcaaggtacagaactaacatgaaattgtaaaatgaaacctagattccaattactttagagttgtagaggatttttgaaagtcttatttaacttgactgcccttttctggtgacattttattttcagttctaaagctgtctgatttccaaaatttacattttcaccatctgcagaatatgcaaatgggagagcaaagtttagtttgtacttggacaagatgtcaacaatttttttcgttttgttttgtttttttttttttttttgcattgtgcattcggcaggttttttatgctctctgtagaaatcaggaggatccggaactcacgttttcaaattttaaaagtacttagaaggtcagagaaacagaatctaacacagaactttcctttttttttgttttgtttttgtttttcgaggcaggatttctctgtatagccctggctgtcctggagctcactctgtagaccaggctggcctcgaactcagaaatccgcctgcctctgcctcctgagtgctgggattaaaggcatgtgttatcaccacctggttataacttttcatacagtagaaagcacaatcttctttgagatttgacggagtcagctggccactggcatagaccaacacatctgacaccctaatttccctttgttcactcacaagaaatgcagttgtgaagcttaaatcgggaaaggcaaccttactccacttcataagcatcggagggaacactacaacaatgcaggtttgtttatatggtgtgccttagctaaattagtggccaccaatttcccttgaacattagtggttttgaagtttttaatttcagacatcaaataaatgtaacagacatttaactgatttgcaagtatttgtcaaccacggtggaatttgaaatgcagtttccacatgtgctttcccatgcctcttcctccttggtaaaattaaaccattcagcatgctctagtttggttgttgaactccctcgtctagttgaatatgtcctctcatctgctattaaaatctccaatatttctcctcctcctcctcttcttccttcttgttttcctttttgagaaagggtttcactatgtagctctggctgacctttagctatgcaaactgaactggtttagaactcggtgatctgctggcctctcccctccagagtgctgagattaaaggcacatgccaccaattctgcctctaaaagtgtttctttgtaagtgttattactgatttaaatcgcagggatgcgtctgtccgtgaggatgcgcacatgagcacaggtgctgaccgagagcacgggtgtcggatgcctccaaagctggagcttcaagcccttgtaagtgacctagtctaggagctcaagtgaactccaggccccttgaagtacaggatgtgtgctcaatcactgaactatccggcccctcaaagaatattacctactactctgtgagggcatccttctcagcacatatggtcaataatccaaatgattctgtctttgtattagcattcatcgtatgagttttccccagaagtgacactctcctatccatcccagacaggatactcaagacagcacaacaacaaaaaaaatgagtccactcaagtgaagcacgcctgaaatgagttttacggggctatgaaggagctcagatgactctaaagcaactgtatcacctaaaagtcgaccccagcatgggtgacgtatcccgaaggttacatttctggaacgccctgcccgcttgcaggcaactccatggaagtctctcctccccgaagtacaatcccctagggtgtggcccccagtcctacctttctgagcttcctgggtctttttttttttttttgctgattttttttttcaattttttattagatatttccttctttcttcaaatgctatcctgaaagtcccctataccccccctgctcccctacccacccactcccacttcttggccctggtgttcccctgtactggggcatataaagtttgcaaggtcaaggggcctctcttcccaatgatggccgactaggtcatcttctgatacatatgcagctagagacatgagctctgggggtactggttagtacatattgttgttccacctatagggttgcggacccctttagctccttgggtactttctctagctcctccattgggggccctgtgttccatgcaatagctgactgtgagcatccacttctgtgtttgccaggcactggcatagcctcacaagagacagctatatcagggtcctttcagcaaaatcttgctggcatgtgcaatagtgtcttgattttcttgtgttttgcaaattgtatcttgggtattctaagtttctgggctaataaagtcttttaagttttgttagcgctagtgtctcgtgagcccccttcttccaggcaggatggaatgtttcaattcagaggaaatagttttggaacagctttcacctctgatgactaacaatagcattcacaatacaccactattcagacggaagcagagttgattgacagttgagtgtgacttacacctggatcatctactttctattcataataatgtcttctcttggggcctggaggaagacaatctaagtggtagattaacatatgaatcgattagaaaataacaagcaacctgcgtgctgtatacaattatatgctaaattgctttgtgtgactgttagtaccacaggaaggtaccggatctcaagcccagagtatatggcagcagccttagactggagaaatgttttcaaacatatagctatcacatattgattggagaactttagaccaacagtatgctaggtggttggaatagaaaaagctataggatgtggtcgtcccttttctcaaacagaccactgtctagtgggagtggcagaagaaagcatatgtaagttcagtaaaatatggacaataataagtctgggatggggacaaactggaaagaagcctcatctaggcaaggggtaagacatggctctagggacacatggggctggcacttaaactgaatcttgaagacttaagggtcttggtacaagaaaattgtaaaaagggagcttcaggatggaagaagtgatgcttaataagataaaggcttttgtttctttatttcccttaccagaaaagctgggggacactcagttacttgtacatagaataagggaaaaatgattccaaatcagcaactgtaaagctaactcttctacaattcctttagtgtgtgtgtccaagtgtgcaggcatgttcacccacgtggaagtcaggggtcaccttgtgagaattagcacccattgggtaggtctgaaggtaagcccaatccccccaccccaaatctaaaaggcagtccaactctccagatatgagctcaacttggactatagggggatttctgttgattagataaaagccagtattccccaggaacttttggttcccagctgtcgaaaggagtcatttactttatctctagcagaagggacatatggttacctgtcacacctattagcatatcaaagcacatgataggatcgcaattacctgttacaaattttaaagtccctgctagtagcatcctaggccttctcacctgctcctctactttagactgcagcgcataggcttccctccccagtgacctactcattctccttgtaaccctgctattctcaatacgtgttctctccctctcctccctctccctcttccctccccctcctccctctctctctctctcctcctcttcctcctcctcctccttctcctcctgcttctcttcctatgttttctattgtctaacccttgctattctttcctctctctcagatagccctggcatgtccagtctgctatccatcattgatctacttctttctctttcctctctggactctttcaaatgcctctggcctctctctctctctctctctcctctctctctctcctctctctctctctctctctctctctctctctctctctctctctctctctccctccctctctcatcaccagttaaaaacctgcctcttaactatgccatggagcagttgtgtcctcggtttatacagtaccctcctctttaatggatgagtactgaagcatgagctcagtccaaggggcttggagatatgtgcctttacccatcttgttggccccctaaaactaactcttgtagctaatatttgaggagttctatgggacagaaaatattaacattgtttttctttaaaataaagtgttttaaagctataacttatttttacttttaaatgtgtgtgtgtgtgtgtgtgtgtgctacacacaggcatgtgagcatgttaaaagcagtgctgtcggatattcgaaagctggagtaccaggcaggtgtgaaccaatcactgttgtgtgagttcatcctgctctttgcctccatgtcttgtgattcattgggaatgtcagatacaatttctcccgtattgtagttttatcattatacaacccttgaggtggtacagatctgtcaacttggtcatgttatataaccaacaatcaaagtaggatgaaagccagtggcagcaacacatattagtgcatatccttactaaatactgtgtttggtgatgatattgataataataatgatgataattattattattattattattattattattattattattattattatttgggttttttcttgagacaggctgtcctagagctcactctgtagaccaggcagacctcgatctcagaaatccacctgcctctgccttccaagtgctgggattaaaggcgtgtgccaccactacccggtgatattgacattattgaatgaagtttcttgggccttccaatgttacaaacagatgaggcacctgagattttatatgtactacactgtagtggcgttctcaaacttttaaattttatgtgcaccacagccttactagataaacgcatagccccaggggctggagaaaggactccgaagttaaaagttaaaaactctggatgcccttccagaagacctggggttgactcctagtacccacaaaagcagctgtaactccagtaccaggggatccaatgcccacttctggcctccttggataccaggcatgtatgtggtatacagacatacatgtaaaataatgcaataacattttaaaaagaaaattataaaaaggagctctaggaaatgaggagtgatgtgtgatgaatcaaaagttcgcatgtctctatttcacttgtcaaaagagctggggacatttctatgtgtgtcactacatgggtgagagtcagagaacagattgcgggagctgcatccccactcccagaagctttgctctggacctgagttttggagccctttgaatcagcttcttccttttgttgtctctgtgatcttgggagagttacttaattgctcaaaaatatcttcctcgataaaatgcaaaaatgacaactcctaagtggaaaagaagacaggagatacaaacagaaactactttgttacattgtaactgtcggttacattgtcactggcagttaactcctcattttgcagatagcaatactgtgcttttcagttatccccgtatcaccatcaatatattaagttcagcttctgtgttttttcaacagtactttacctggtgtccatagttccctaaatcattcctctggccaccatagctagtttcctgggcaggggctatatcaatcagactaagcctcgaattgccaaagaaggtatatcaacaactaggtccattcaaaaccctagctcctaaagagccaaagagccgcatggactggacagacttaggagtgctgcagagccttgatgataaacttcatggaagacaaaatgagttgtagaatgctgggagctaacactagtggggacgtgaagttcagtgtagttgccagatgctgtaacagccagcagagcagggaaaactagctgtcatatttgttgggggaagaaacatgatttaaatcattatctgtctttgtgcactgtgtgaaccttgtaaatgatatttcttttttgactgatgtagaaattaacgctcagagtggtcaaataatgattcatattcaggctcctttctctcttagacaacatctcatacagagaaatcacgtttgttcaccagaacatctacaatatttaacccaagcaatttaaacctcttaaaaaataagaaatataaaaatgtttggtataaaaaccatgactatgaccagggagagtagctctgtgggagaacaaacaaaggcatgggttcagtctcctctgccactaaaaactagtagaaataaaagaggtgacacgtctgtcatgggtgaaagttcacatttatttatgtgcttcctccaggtaaactccccaacctcacctcccaaggccatgtttaatctaatgtctaggaggcacttggtgtgtctttggtgaatgaatgagtgatccaccagtgttgagtatacccagaagctcataggcagatagggcatacttagcttacagtcaaaacattacaccaatctttctgaaatgaatgaaaaggtttcttaactatgaggttcttccatgtgagcctcagcagaagacctgagaagttgaagactttcagactccccaggagatggtaccaaacaaacatttgaacaacaacaacaacaaaaaccaccactgtatttttagcaggctcctaagatctcatttccataactttaactgttgggcacggaagagcaacagaccagcacagggtgtgattgtgtcttgggaaaattctgccttatatcataaagtgaaagaagaaggaaactttaaaagaaaccaacacagcatccaagtgacagatctagggaactgttgctttgagccaaggaaaatggaagattcagggctggagatatggctcagtagttaagagcatgctgctgctcttgcagagacaggtgtgtgtccagatcacatcctgggtccagaacccatatggctgctcacaaccacctgtaagtccaatatcagaaagcccaatctacccttatctagcctctataggtaccaggtacacatgcggtacacaatacatacaagtaggtaaaatacccagatgcatagataaaaacaaatctttaaaatgtaagaaaagatggaaatttcaatttaagaagatagcccccaaagtgtatgatataacttatatgggatgaaaaaaaaaagtcaagaaacagggaaaagattcatcatgggctttgagcatgacaacagaattcagattttcctgaacccttgacctatcctcaaagatccagatcaaaagaatggctctcagggatgtgcttcctggctttctgggcactgtccaaaaatccttggggagtctgattatgttagagaagttcatatagtgtgctgaaacctagtgagtggccttactacatcttttacatggacaattccttgaagccaggacctgtgttttattttcagctttttttttattccctcggttttattgagatagatatacttcaaaaatactttatatatttaagttttataacttgatgagtttgtggggattttctcatatttattttttaaatgtattcatttttattttaaaaattttcttctctcttcagccccgcttgttcctgccccactcttgaacggcttttttttttttttttttcggtttttcaagacagggtttctctgtatagccctggctgtcctggaactcactttgtagaccaggctggcctcgaactcagaaatccgtctgcctctgcctcccgagtgctgggattaaaggcgtgtgccaccacgcccggcttccgaaaggcttatttttatttatctgtattatatatttatatgtatgtgagtacaatatcactctcttcagacacaccagaagagggcatcagatctcattagagatggttgtgagccaccatgtggttgctgggatttgatcccaggaactctggaagagcagtcggtgagccatctctccagccttattcatttttactttatgtgtacggatattcagcctgcatgcttgtcagtgtaccatgtgtatacctggtgcctttgaagttgagaagatgacattggtccccctgggactcaagttacaggtggttgtgagtcctagggactaaatccaggttttctgccaaaacagccagtgctcttgacttctgagccatctctctagctgcacattgatttttgagtcaggatcttgcggtgtagctcaggctagcttggaaatctcaaggtcctcctgcctctaattcctgagagcaggggttatagttgagcaccctcagtcacatccagcgtccacttgctgtgttagtaaggagctatgccatgtcccctttcaagtctctataacctccaatactagttgctatacagaagccacctgtaatgtttgttgaataaatggctgaagagtaaccagaggcacaggacggtagaagcagatggatcttttgagagtagaggcaagctagagcaaagcaactggtgccccagggcagagccaattggatcagagtgagatggatgtattagatgatgttgggaccgttgctgagtatgaagtacaaaaaaagcagtaactggagcccgaaggagaagagtagaagaggattggtactggtgaatcactaggagatcagtgtggcctatgctagatccccaggcactaagagcaggaaataacaggctgcatccatcagtcatgctaattgggactggttaccacgcctgggcccgaaggtaactgaatccactgataacactctaggaactctcttttacttctccctgtctgtaaggtacttactgcttacatctcctgttgtagccatttgtctttttcttagtagactgtaatgagctgaaagcaaaagctgtgtcttaatcattattgtgctgtagctgaccacagtgctttgtacacatcgggcagtgtacgactcttccttaggtgtgcaccttcagcacatcattccgtattggtttacttgatggcctcagtatttagatcgtgaactcaatgggcttgtgtcagattaatctgtttccttttggcttggaacttcgttttgcaaacttttattggcttaaattgtgttcaagtaagtgcatgaataaaagagtggatgaaagaatggtaaaaatgtgggactagggtgtcaaaaagacctatgctgttcaagtgcattttctcttacatatttatctgtatgattgtggcatcaataaacctataaaacttgggagatggtggtggaaggcctctgatttacatacagtttaaatggaatactcattgtggatcttcctatgcaaatctctagtcactaccttaaagagtaaccgcaggcaaagggcagtggaagcaggtggatcttttaagagtgaaggcaaggtagggcaaagcaactggtgcccgatgcttctacagcacaggagagatgtgaagtaagggggggggagcacaggtctaggtgctaaaatcaggacagatagataactcagcacctgcactacagaaagataccttaaagctaaatgattgatttgtaggtcctcattgagttccatgtgaatgaatcaatgttacaccactatgattactggtttcttgtgcaatgaaatttaaggttgaccttgaaaagaaaaaaaaacccataaagattgatggaacaacatgtaaaaacattggatccagagtgtaaattcactcccattgcaggaaacatggctaaatcagacagctttttaaagcctcgctggttcgttagatttttttttctttttaaaaaatggtttcccctcacagaggccagaagaaaataacaaaagttgaccctcacataaagtatactatgtccccagacattaatgtgatttgtacatattaactcatttctcacaacattttgtgagggagaccattgcgttctccattttagaattgataagtctgagggacgagaggtaatacaacgtgatcaaggtcacagagctagaagtgagggagctgagagtcacagtcaggagtatgcctccaataagctaagagagaaagggagggagggagagagagaaagagagagagagagagcgcgcactggtttaggtatgtagctcatttgtgtggaatataaagaaaatcactcatcttttttgattatggcaactccagcatttacaaagagtcagccagctattacggtaatacatgcttcagttgcatccttagtcttcttcacaataaacttggaaggtatttcatcctcatttccaagacattccgtcctcctcctccaaaaaaaaaaaaaaaaaaaaaaaaaaaaaggttgagtgattaaaacgattagcccaaagacggccatgcaaataagaaaactgcactgggagctctttgccggcagtgaaatcaggcgaaaggaggaccccacagggatgccaggagagtacaatgaaataatggatgtaaaaaggcctcgacgaacaagtgcaagggctaaggcctgtgcatttgcttcgcgggaaaaccggttccccaggacctggtcccaggctttctggccccaacccaacgccttctcctcccagtgcctagctttctcttcaaatctctttctccgtctcctccactcctgccccccaagcctcagccgggcggcagagcggagaatagaaggtccgcgcgcgagcaggaggcggggcaccccgaacctttcgaggggccggtctgcgcgcgtgcgccgtccttcggcggcttcaaccgccccggctcggtggccaatcagagtgcccggcgcgctcgagacgtctcaacgtcctgtgggtcgtgtgcgtacggagggaggcaacgtaagggcgctcggcgagcccgtctctcctcgaatgaaaggaaactacccctggcgacagagccccgctcttcggcagtgccggagaaccgactcccgccttccccgtcttccctcgtgggcgctgtcctcccttcgcccagccgtgagccccactggtgagttccccgcggtagccaggggccccccattctctctctggcgggagaagacgaagaggatggcggtggccaggccgccgcccctgcccgttgttacgggggggactggcggtggtctccttcattgtcagggacccccagaggcgccgcgcattgtcggtgctccctacagaggctggcgacctagtgccgtgggggcgctgagggacatgttaggcggcagcctagacttcgggggagggggcttcacatcggaggagagaaatactgggatgggggcttcaaaaaaaaaaaaactctgctgacgcttagatggtttcagtggtaaggagggtgactacttccgaagtgtaagagaaaaaaaaaatggttaggatggcatgagggtaagccttacggaatgagggggagaaaaagaaaaactccccagtaaggggaatcgggcgaaagtgatggataaggagatgcttcggagtcaggtccttagaggacgaactcctggggaagggaggagtgtgaagaaggtgatattttcctgaattccagagacttggccaaggacaatcggaggggggggggaccccgactttctggctgaaaggaacctactgaagtgttgggaaggaagagactttttcgagtttatccagcgccttggttagagggagatctaggaggctagtgtgcgattggggaatacataacggagagaatccgctctgtttcctgcctggtcctttattacatgggcgaacagcacggcgttcttttgcagtttctattcgtttcgatattctgtgtgaaagtgaaaaacaaatcttttgatgtttgaaaagcctttaattttcctctggttcctacgtaatatcgggtcttattcatacagttcaaatttcttcactaccctttggcttgaaacaactggaaaattcctttagtttccttttgaataaccgcaaaaaaaaaaaaaaaaaaagcagtgcgaagcatgtaataatatcgtgcaaccaaattcaggtgcccttccggtacatttcctattcatttatttctcttcactgcaactttgctgagagaaagaccgtgttatctttggaggatcgcacttatatctgtgaatttcaactggcttgcatgcggaaggtttttcatcttccggaactgcagttttgttttgtttgtttttttcggtagaaaacgttcttttaagatactagccattgactaagctctcgagttggttctcgaatgccctccttggtcatccaggtggtttctacctcgatgcttcacagcatcttggaaaatcggaaatgcattcattgtttcagcggggtttctttttcagacatttaaactgtatttcccataaaattactgttgtttctttcacctttacacattatccataatgttacctttctttgaaacatctcattgttgggttaaagtattgaactttgagctttgcctgttcttgaaaaacctttaaattaaaacgaaagcgctcaatagatgtttttgagccccataagtaatgctgattgaatgtccttattctgcttaaccctagaccacaagtgtgacagtagtagataaaaatctgtattttttttgatagacagttttgctaggcgtcattgtttccatgatgggctctgctgctgcatggtttataaggcagatgtaaaaaatcagcaagctctgcacacatgcattatttgaattttagtggaaaaatccaattagtcattgcatagcaaggcaaatttttaatcgtttgttgcacatttgtgtgtttctgttcactttcaaataaaatataaattaccaagaaatgtgtgaatgctttacaatgcaaagtaagtatatgtgtgtatgtatgtgtgtgtgtgaaaatatatatatatatatatatatatatatatatatatatatatatatatatatatatattctcttttagattttggaatctttggtatctagaaaagcaggttctgaaaattaagatgaaaaaatacactgtttgttagttaaaagaggcaatagtgaataaagatagaatggagcggggtaccatttcagattcaatttggggaataaaggatgattttccctctaagaattttgcttatcttcagccattttttaaaagctagtgctgggattgtttagaaacaacacattaaagatgcctatgaagataagatttgtaatgtagcatcttttcagctgccccggctgacctggagaaatgctgaatacatacatcatggtgacttaacagtgcctataattcattgcatggtagtaaagaaaacacatttagaactccagtagcagatctgggtgctatttatgaatcttggtgtttttgcatagctctaaaaactggagcagctatatttttcataaagcaagtggacatatacttgccagagcaaatgcaaacacacttcctcttttgtttcttttgtttctctgctttcttctttttttttttttaatgctaaaagctttgctgcctatttccaattagtttcagggtttatagccagtgttctgaaatcagtattactgagaagtaccccatggcacttggaagactggggtatttaaaattataggtagcattaagagtttgttaaaatcagcaaaggagagacagcaaaacctttgaagtctcgttcaaaagcaaatagtggatataaattaatgagaagaaatgttttctttgtggcttcatattactttacatcctgatgatcctccgtgaatggctctgaatggcgcattaccttgctgctgctgctgctgctgttactgctgctgctgctgctgaagagatgcttctcagagagttaccaactagttagtgagccatgtctctaagcacaatgtcctgagaatatttaaatgtatataaatggcaataactgaataaactaatttgaagacagacgtttgagattctattgattgtgatgagtgttatgccaacctgggtctaagctgcttattcccagtaattgggcgaattatacagatcaaaacactgatttgaaatttgttgagtgatggtattaaatgatgtctgttgagaatgatgatccaaatctgtagacttctgtgttacagcttttcttcccttttttggtttgacggtacagcctataattataatctgatcaaatgtgaggctcattcagaattttccttccacttcacagcattgctaacttatatatggaagttagcattgctaacttatatgtgaaagttgctgcatgtaggagatcactatcagattgccttttaataagtagacttgggataaatctcagtcaaataaaatggtttagtaaatagtgggatcctaaagactgcattttatggtacacgagtagaagctttattatttcattacaagaaaagggaacaatagcaatagtctaaggtcaaaaacatgattttcttatatttgaagtatttcaagttttaaaaataactgtttcaaagttatgcttaattttacttttaatactttattcagtatgtgaactggacaaaatcaagcaactaaataattcagttctctcaatattttgtagttttctttgtagttttaacttgttcttagatcttcatcattctgtttccttggtggacatatatctaaacttgaaatttatttttttatctttaattatactagtggatgatttaattttgtgattttggttttctggatggtcctcaggctcaccttgtggtgcaggcaggcctcttacttatgaccttttacctgaaccgaagctgtgttatatattcttatcacacaagaggaatttgatttcacatcttctaatttggatttattttgatttctctcaatgactctagatttgattgctttcttgccacttctttttccctttcttaacatctattatgtatggaaggcatcttgggtttttgatatttatctctactagtatttaagtaaactatattacaacctgggtcagatatagagctacttgtgtggatccgtataaggtcattttgaatggaaattaaccattttgttgccgtttttatcctctatagcatttcttgaggcttaaagtggcagtctctaaacactttaaaaatcatgtcaagctcaattgaacagaaaaaagggtctacgagacagcgtaaatgtggcttttgtaagtcaaatagagacaaggaatgtggacagttactgatatctgaaaaccagaaggtggcagcacaccacaagtgcatggtgagtatactggcatccatcaaggcaccgaaaaaccattctcgagaaataatcttttttttgttttttgttttttttttttttttggtttgtttttcgagacaaggtttctctgtatagccctggctgtcctggaactcactctgtagaccaggctggcctcgaactcagaaatccacctgcctctgcctcccgagtgctgggattaaaggcgtgcgccaccatgcccagttcgagaaagaatcttaataactaacatattagtattactaaatatgaaaagcaaaaaaaaccggttagatttgtaagaaatggtttaacactatacaatgtcattttaatagaaaatttatttttaagtttagcatcttagtcattgtcttgatgtaattatatgcaaactgtaattttttcaaatgttatttatagctgttttcgtctgctttggtgtcctcacattctgataatgagagtcttggtggattttctattgaagatgttcaaaaggaaattaaaagaggcacaaagctggtaagttggtatttctgcctcttaagcttagaattacttaaaactcacgaagaaggaaattacttattttaaagtgttttactttgtagatttcctataattttaaattgtgggctgtttttattttctagcgagtaaatccaaagcttggtttgtttacaactcaacaaaaaggagtgaatcaatatcttgaaatatttcttctccaaaggaaaatcttaaagcctgtgattacttacaaaataagcaggttacttaatttgcatgtatcatgtttcaaatcttcattcaaatgtaattttcataattctggtatgtcttcccttttcatcataaagttaggatgggtcatcacagactgagatgacagtggcccagtcagcagggaagtgataagtcttgctaacagaatcttggtctggggtttggctatatgacacagcatctatgactttggataacttttggtgaattttccaggaatttttccaaagctacgctagagttatgttcctgtagttatctttaccaccagtaaccagtgtggccagctgttatattggtccttgggaaaagtagcgtaatctcaattggtatttacaacaccgacttatcgtgcagtgcttcattgactgaaagatttcttttcatttggctgttttttcttgtttgatctcttaattggaattacatccattgttgtagtgagatcttaactgtgaatgctatcttatcatcccaaccctaaactgtaaataagaatagaaaagacctggggtttttaaatgtgatttccctttgatgacttttctttgcttcatgtaactgtagtatgctgatcattttaaagggaccaggataccatatttttatttcctggtccttaaaagtaattcagattcaattagagaatgctatttacttgaaaatagtgctgtaaaccttatggcttagcataccctttgtcattataataacccttcctgttcttgataagataaacagggcacacttgataatgcctccggttctcaaacctggtatttgcccctgttactgacagaggattaagaaacttggtgccatcattttgaatgttacatgaggcaggagtatacatctgtcagtggtgctgtattcaatcgagatttcatttatttgaacctgtttgtaaagaaaataccagaactggatagaagttttactattaggaactattttgttttgaatgtcataaactggtgtgttaatttctcccacccccagccccaccccaggagtagtgtgctataaatagctcaaattgctccttgatctcgtgagtggaataatattgagggttaaatgcctagaaatagtaataggcttgggcttgaatcccatccctgtcactaactgggtgaccctgagtaagttatttccttccctaagctgggccttcttatataagggatagtgcacacacctgactcacaatgttattactaggattaaaagagaatacgcaggactaagcgtgctgctcagttcttggttaatattaagatgtgaccaatggtagccacctctggttattctttacagataaaatcctgctaatgtcatagaagactaattgaaagcatgctaggcagacaagtcatgagatgaaatatttttaggtgcttgagattgaatccatggcttaaatatgcagagcatatgctttactcctaaacgacacccccagccctatagctttcttttctgggaaattaccatggacacattgttatctcagacaagtcactaccttccttgtcttttgctgccgatcagtagatactgttttatcatcacatactactaaacagcaatgagaagaaattgttataaaaggtagaaggatttaccagaggctggtgggaatgactcattgatagaagatttctcaagcatgcacactattgccagcactaatgcactaagagttacgacttgtttcaaaggctacttgacactgtggctgtcttgaattgtgggatagcggcaattcggcatccaaagtcttagaatttaaattactcatttggtgaattgggagagcaacatttatctatttcagtttgaaatgatttcttaaatttaaaatttttggtttatttaatgtgcctgcatgtttgcctgcttgtatgtatatatgtacgtatgtgcactgtgtgaatgcctggggcacatggaggccggaggagggtatcggattcccctgatattggagctgccatgcacgtaatcttctgaaaggatcctatgaaagagcaacaagggcccttaacgactaatccatctcattagccccttaaattttcctctaagatttagttttgtttcacttatgtgtacaggtatgtttatatgagggcagcttcccatggagaccagaaggcagcattcattgccctggagcaggaattataggcagttatgagttgcctgatgttaatgctggtagcagaacttgaatcttttacaaaagtaatatatactcttaacagctaaattctctctccaggcactgacatagcttagcttgcagttttcttccttacattatattgttttctttttaatgaggtactgccaattaaccaatattctttattttagttatctttactttccctggtatagctttgtctaagcaataaaaggacctcagttcatataggagagaataaaaaatagctttatatatctaaactatgtataaaccaagtaactggtttccctgggcagctttttaaagcatttaattctgtgagcctttttgccctgactccagttcctgtgcatctcgagatgaaaagggtcatgagtacccactgaaaacagtccaaagcaggagtccagtctgctgtgtgcattcatggtcaacttcagccagtacctgctgttccttctgaaggtgttcatttgccccatagaagaggagctgactcagggcttgatgcaggatgcaggtggctggatgggaatcttgcagaggcggggatgctcagtagagcaagaaatgtgggtagatggttcctgcaggtatacagctcctctacccataagcacttttctcacatttccatatcagcttcaaggatcagagatggaaagtcattttgtatgactgtatttatctcttttctccattttattaagtacataagcccaaagctgtgcttggtagagcacacctttaatcccagcactttggaggcagaagcaggtggatgtctgtgagttcaaggccaacctgatctacaaatggactccaggaaagccagggctacacaaagaaaccctgtcaccccccccccaaaaaaaaaaaaaaactttaactaactaaataaaatatataggcccaagatataggaagaaaaaaagaaaataactatttgcagttcttatttatttttcccataatgacttccagttctttattgaagacatataagatgccatatctgtactctgttccagctatattttgtttttgagtcaaggtttcatgtgaccctggcaggcctgaaactcactgtgtagctgagggtggctttgattactaatccccctgacccctctttccaagtgtcgagatattatacgtatgtgctgtagccacctgataagtctatccttgttcaccacggagacaaaaaggtgatttcccagggaagttctaagtaatggttgctcgtttgaatttgctgtgaggagacagtggagcgtggtatttgattagaagaatggattctttcggaagcacctcgtgatagcactgagatctcaggctgagagtcacttttactaattgctccctgggtcaggtcagagagataacggatgtcaaaagaattccggaggtcacgcagttcaccttccttacccctaggcaagatttacctaagccatccaggatgatacactcctctgccctgttcgggtgttagcagactgattctctactcaagtcacatgaaatacgaacagtattgtatttgagaaaatcatccctctgtaattttagtacatctcttcatttgaagctctttattctatttccattaacgaactattcaggattgttgtttttttctccctttatttaaaaagaatccttcctatacacaatggccattctcacatgattctgaaactatcctattttcaaatgagaattttctactacaccttatgaactccgctgaatggatttttttaaagaccttttatttttattttatatttacacgtgagtacactgttgctgtcctcagacacactagaagagggtatcggatcccattccagatggttgtgagccaccatgtggtttctgggaattgaactgaggtcctctggaagagcagccagtgagtgctcttaacctctgagccatctctccagcccctgaatgtctgaatgaatgttttatactttttctaatagtagaacctgctgatacttacggagtacttgatatgtgctaaggagtaggctattttaaatacagatcctgattaatcctcacagtcatactgcaagaaaagaaagtactcattcctgccttatacaaaaggaaactgaggctcagagaagtaaagtctgtggtcatatagctagcacttggcagatcacagatttgaacccatggccagagctcctaatcatcaggttatactacctgttcgttttagctgctccatgccaaatcacatttttaaaaagtatgatggctttctaatgcagatggcaaagtttgggacatgctcagactcctatttaatgtattttgtcagtagcattatcttactgttaggacagaaccctatatgtatgctaggtaaaaatggtctattcttactctggagatattttttgtagtctcggaccataagaaaacacattctacatagcatttatgcagttggaggggggcatgcaacatggcagaggcagggtgtgtatagttatgatctaaatagccaactcctagtgagtgttcattctttttggagggtgttccttatttaaaaggttaagacttcctagagatagtcaggtactggaatgaatgtagaaaacactttgagttttaccagattaaaattgagtaaaggcaggcagtggtggcacaagcctttaatcccagcacttgagaggcagaggtaggtggccagaatgagttccaggacagccagggatacacaaagaaaccctgtctcggggggaaaaaaagaatggttaaaagtttttttttttttttttttaagatcagacaagaattttaactgagaacaaaaaaggcaagtaggattttttggagacatgatctataccacaggttctgtggagaatgaagcataatgattgcaatttactggcctgcttgttctccgttgatgtcctgcaggcatgttaaactacctgtctaaaccagtatttagaaccttcggctctgaactctgagtctctttctttctgaatcccttaccttcagtccttccacatctgttgtgtagattctctctctgagcatgctttgtctttttaaaggtttatttattttatatacatgagtacactgtagctgtcttaaggcgcaccagaagaggccatcagattccatgttgtgagccacatggttgctgggaattgaactcaggatctcgggaagagcagccctctctccagcctgtcttttctttcttaatggtaccctctatcaagttttcctcttcttgtttcctaataaacataaccacttgtacttgcctaactacctttaatagctactaccaggcttgtgagatggttcggctctggtaaaggtacttgccaccaagcctgacaacctgagtttgatccctaggatgcacatggtggaaggggggaaccaacatgattctgagaaagcctgtcttaacggactgttcctggcctgctctcctttctcagcttttcagacatcccctctatgtgttccttcactgctgcttcacaaaagttccttttgtacggctcagctcaaactcctgcttgtcactgccgtatagaccagcactgcatgctttgtagtcaggacacatgggcaagctttttcttccatggtgaactgtggtctccaagagagttgaaaatatattctctttgcctggtgtattatcacatgggcatagtacatgaatgtatttggcacagtgctttaaatcttctttgtgatcagtaagtgggcactgatcagtccttgcatttcaaagaggagtgggtctggataggaaaaagtgagaagcctttaataacgggctgggtttagactggaataacataaaaaaatcccgatttggttaatcggtgttgtagtattgttttgacgctttggcagtttgaaaggggagtagaattaacttcgcttaaaaaaattagcctggttatttcttcagtatggtggggaatgtgtatttctcaaagatgagaaatgttttcgaattatctccttaaccatcactcacccagtgttgttacttttgttatattcttgggcattctatttgtcaggtaaaccttcggttttatctttatatgtgtttatcaaatagtccagcacctacttcgtgccaggcacagtgctagatactttggaaatagacttaaaataaattagccttagaagtaaagagccatgggagagctgggaaagaagaccacagctgatgtacctgagaagtcacaaggttttgtgggaagtgacatctgagcctagtatggtgacccacatcagtaataccagcaactcaggaggctgaggcaggaggaggatgggagctcctgacaagcttgggctacagaggataaccttttcctggtttttttttttttaaagggtggtctgatactgtggaactcaaaggtagaagggaaggtttcaaggaagaagtgttgggtgatggtggatgctacataggttcttataacaatgatccttcaccaacttgaataaatgagaaaaggactggttttaagaaaagcacaccttggcttttataagatagagtctcagtgtatactctgtgtactggctagttttgtgtcaacttgacacagctggagttatcacagagaaaggagcttcagttgaggaaatgcctccatgagatccagctgtaaggcattttctcaattagtgatcaagggggaaaggccccttgtgggtgggaccatctctgggctggtagtcttggggtctataagagagcaggctgagcaagccaggggaggcaagccagtgaagaacatccctccatggcctctgcatcagctcctgcttcctgacctgcttgagttccagtcctgacttccttggtgatgaacgcagtatggaagtgtaagctgaataaaccctttcctccccaacctgcttctggtcatgatgtttgtgcaggaatataaactctgactttaaaattttcctgccccaatcttctgaatgctaggagtacaggtgtctgacacaaggcaaactttttaataaaagactagataataaagttgtaaggccttccccagctacttgggcttaattgtaatcaaaggcaacaaaggcgtttttgctttgctacagttaaacttcatttacaagaacaaaaagcaggccatgttgctctcccaggacatttgccatagagtatttggggaggaaaaagaggtaaaatttccctgtgaagaactttttcttcatctttgtaactgtgtacacgtgcattaggaatgtattcatgcaagtgggaattctttttaaaagccagttgtggcatgcaggttaattttaatgtctgtaggtattttatcagaaatttctattaaagtgaactttgcattcgtggtgattaagtagactaagcagtgctggagaaaactgtctggctattatggaaatgcatttatttaaatgcaatcttttttctttgccttcctgtagtcgttttgcaattgggagcactaactttatgtcatagaattctcatttgtgtttgcgaatggaggagaactaaaaccagtaatgtaaaggcagagctccgctcaggaggtgcagctcactgcaggattgtttgtacagtatggtcaagaacctgagttcaatcctcagaaccgcaaaaaccactggccagtaatggcaaatgggctctgtgtggcttgggggactctcttggtgcttacttgagtgtgcctgtgttttgggccttcttcacagattaaatatagcaagcatcctggcagttcacaatattcacagctgcaacgacccatagctgagaaaaatctaaacaaatatgtttgcacttgcaaaatgcctgaaattttcagctgaagaaaatgggaaagaagcaaacttgacgtgctccagtgggagactgtttttcttatcagacatggtttgggtaattggatcgagttggaatagttgagtactcagcggaaggtcagaggggatagattaggcaagaacttcccagtctaagtttactgtccttcaggttccaagtctccctcaactacttcatttcctctgttactctggtaaaaaaaatatatgacaagtgcttttcattggctctattgtttttttagagatacctagaatttgaagtccaaatctgtcttctaagcaacttgtcactacttttcaaggatgtgagtgttcagattttattgaggggttttagcttccttttagacttcctaagcctgttttgatttgtgatccccttcgaaaagactggttttgaaaacacgagtagagctataatatcacatcgaagcagtttgtaattcataccccatccttggcagtgccattcttttaaaaaaaaattgtaacaagtaatttggtgactgtcaactaacttggtaagccagaggctgcttctgtctatgttggctatgtgaggttttattattctccactatgatcctggagttgtacagcaatattagggcatttctgactgtttgctttaactgtactggcctgctttctggtttttatgggagatgatgttattacagccagaagaactagccaggccgctgtaaggtgagcttgtttcttgtgaagacagcctaggtatgggtgtccctttctttaggtgcttttgacaatttgtttctttgcattacaggctcaggctcatggcttcttttcataccttcttttgcattttctgtattcaaagcagttttctgaagcgagtgtctccaacgcagttaaccacattgatctgctgggagcatatatatgtgctgggagttcctctgctacagctgagctctgggagcctcctctaagggtctccaggtagccactggattctagcttttccacaaacgctttctttttctgcctagccatgaagttggcaacctctttttcattttcttccccgtggctgctgagaaaacagtgtttttccttttgatccttaagacttggtggagacttggtttcattattggccttgttcagttgactgaagcgcaggtatgcttcgctgtctgcttcctacggtccagctaaattttagtctttgagttctttgtgtggcctctcatgcgtgacttggttcctctttcatctgcgggtcagctccctgagacctgcttgtgtggtacagcttaacccacgttagcatgccagaacttgcggctggtcccacagcttctgagcatcctgcagaaaggctgagcggtcccctgtgactggacaggacctcctttccaaacctccaagtttggagctggggattcagaattgaggtttctcagctcttccaggagtaaggtgaagagggggtaaaagaaaaaagcattatcgctgacaatgtttttgcctgtttaaaagaagaccaaccgtggagtgggatacaagcagagtaagccgagaattaacatgtatacctacatggggaaaaggaaattgggcctcaagagaatatttagtaggtaggtcagcctcctctctcttgagccgggaaaggacaccattgttcttgaaaaacgtgttcctgtcagtttagtttttattttcccacatctgaaggcaacagggacacattggaagtgtgatgaaaacggcaactgatgctcttcttctggatggcaagtagtgggaaagagggtgacaaacttcagagcagatattgtctgtaaagtcagccgctgggtacggagctaggtcccatctcacataccttgatgtgctgatgatggtggcaatggtgcggtctcgtttgttttttgtttgagagaagggtctctctttgtatcccagctggcttgaaactcacagacctgaccctgcttcttccttcctggagctgagattaaggcatgtgccactgtgcccaacatgcttctaaattttatttcattcactgaccatttcatacatttatgcaatttatttttatcatgtgtatcctccattaccttcctccagctgctcctagtgtcccccaccttgtcaccctgctaacttcatgaccttccttttgttactactagccccatgagtccaattattgctgcccatatgtgcatgtgtgggaggccatccaccggggtatggggaacctctcggcagccaggtccccaaaggacagtgcttctcccttcctttctaatgttttttgttttagaagaagccatctcttttatttcagaaatggttctccctacctgtcttctttcctagcttctttaattatgatatttatctgtaagctttcaattttgtttctagaagagctaatctgttctccctactttctgtgtttgttgaactgaattgtactcaattttacttttccagttcttgaacatagagctcgtaatttattttgtgtgtcttttgtttgtttgaatgtatgtgagttttgtgcatgtgttgggcagtgcattcagaggtcagaagagaatgtagagctaacagattgttatgaaccactgtgttgattctgagaactgaacctgggccagtgttctcatccaaggaaccatctctattactcactgtttctgagaaagggtctcagtgtagctcagattaactctgaactcaggttgccatcacacaagactctcaacttagtcgccagagttctgctattaaaggcatatacctatatccagttcataattatatttagaaatacctgaaggtaaattaggtaaagtcttccaatgtgtgtgtgtgggtgggttgcgcgcatgcactacagcgcacttgtgtagttagaagacaactttgtagagtcagttgtcttccttctgcctttatgtgcctttatgtggcttttatctcaaaaaggaaactaagtctctggagagatggctcacaaccgtgtgtaactccaattccaggggatctgatgccctcttctgattttctcaagcacacaaacacccatatacataaaaaaaaaaaaaataaggaaaaaaagtttaagtaaaacgaacaccctctccccaaaatctaaagcccccccccaattttctattcctaattttgacaaatattttcttctgtaaaatattttattgatattttgtcctatttttcattgaatagaactaataacaaaataagcttttgaacactttaaaaaatatggtcttctggggctggtaagatggctcagtggtttagctcattggttagtcttccaaaggtcctgagttcaagtcccagcaaccacatgctggttcatgaccatctttaaggggatttggtgccctctactggcaggtgcgtatacctgcagcagaacccttatatgttaaataaaattttaaaaatggtcttcctgtgtttcctatgattacttataaaattgctttctgttaccttagctgcttaaaccacttatttggacaaatctgagtttatagatgccacagtcatccctcccccaattattcaaatattttggtttcctttgctttctcagttgagaggcaggcattgaattcattggcggctgcactattcctgatacttttgaaaacaaatttttgtataacaaaatactgaacgttgtagaaaaatcagaaaatacagagaattaagaaaatcattcaaagataacaacccaacattttgctatttacttcccaccccttttcaaagactatatactggagaccttattgagattgaaattcacatagtttcatattctctattagctttccacttagcatatataaacccattattttgaagctgggatgttactcatgcctgccattccagcacttggtaggctcacaatcttgagttcagcttgggcaacaatgtgagatgttctctgaaagaaaaattctcagaaggagattcattgaaacatgtttcagttgttttaaaattgggactattcaaaacaattctgcaatgaatatgcttgtacagtcattgtttatgcctgttactattttcagtaaataagttggaaatataattgctagaacaagagctataaactttgggaaggtagtatttctaatcctttgctttggaggggttgaaatttgaacctagggctcacacatgtgagcaagtgtgctatgtatgatcttgctatataccccgatcagcactgcgtttctttttatagtaattacttgaagtttcagtactcatttgaagaagtgggttatttcttgtgtagccctcgtgttttctgggaagtacctacattgagaactttttttttttttttttacttacatgggtatttttaaaaaatgatagcatgaatgagtttgagtgtttgatttccttagagaagtacaagaaattttattggaatttatattagcctgctagtgtgtgcatcgacattacttagggatcaagtagtccaaatgttggatcgtaagtttctgtctctttgcttgttgtttgatcttggaggtagagtgtgtgtaatgtagcccaggttggcctgaaactcaaccctgccttagcctcctgattattgagatcagtgtttagaacaaggcgtttggcaaccaggaaacaacgtgaaggttttgttgttgccttactgtggttcactttgatgtggcatttatagcttaggagatggcgcattaaaagcctgctgggtatggtacactgtgttttgtgaaccaaagctattaataatgattgctgtgtaccttttaaaaaaggaattgtttttggggctggcaagatggctcagcgggtaagggcactgactgctcttccaaaggtcctgagttcaagtcccagcaaccacatggtggcttacaaccattcgtaatgagatctgacgccctcttctggtgtgcctgaagacagcaacagtgtacttacatataataaataaataaatctttaaaaaaaagagagagagaaactcttaaaaaaagaattgtttttgaaatatagagctggtcaatcactaataagttcagaatataaggtaaatttgagttgaaagaatctttttttttctgttggcttgaattcataatgcaaagggtaagtaagattaaattaaagcagacaggcatattttcacagtataatcaattagctatcacaaaatatcctcaactcaagagattcaaagtagtatatctttcttttaccctctccactggcctaccctccagttgattttaccagcttccccaaaatactgtagggaagtttttctcaaaagattttcatttaagtctttattaatcttccttaaatctttaataaatcttcatttaactctgattttaagaactctttgccgatgatattaggactggtggcaggacattgtgactgggatagcagtagcatccttactgtggaagttttagaaaaaaaaagtctcatgagatatttttcctaattactggtatccagcaagttctggattgcaaaagagatctaggtttttatagtgtcagttgtatctagctcagctccatgatttatagcatttcaaatgttctcctgaccacagtagaccatcacacatttatagcatcctacatattttgtcagtaaaatagaaagtaccatcagaataattttattcaatttttttcaggagacaaaataaggaaaataacatgaattagacttttttctataaccagtttgcttttcctgacagaaattggaatgtcctagcctgtttgggacagtattagcagaattacatttgaatattgttttgttgtttttccctagatgtgttctctttgtcattgtcctggagcaaccattggctgtgatgtgaaaacctgccacaggacataccactaccactgtgcattgcatgataaagctcagatccgagagaaaccttcgcaagggatttacatgtaactggctcattttgcttggttttaaagcagccccgctgtccttcaggcttttccattttcctccattcaaagcatttcaccgtcactatgaaggcttttttgatatgtatgatatgtaatagttaaagcaatgatttaggaagtgtcacactgaggtttataacataattccagtttatgaataaggtggactgtgctgctcatttttgtaatttgaaaatgaattgaatttagttttatatacttcacattttgtatttttccccttcagggtttattgtcgaaaacacaagaaaactgcacataactcggaaggtatgtttcattagccagttttatgtttcaagagaaaattagagtaaaatataaatgagtagtcctctactaagtttttccttatgataggtcttattattcaatatctttataattggagatgttattacatcagtccaatgtaaatagtcaaaaagagctaaatttttaaagaaaaaaatgccccagaaatcttatgaatatactgaaaactcatgtcatattaggaagaaactgtggtagaggtgacatgtttctccacaggtggttattggattcttgctcccaatagctattacagtgtgagcctaggaatcctagtgcactttggatcagcgtgcactctggtgaaatgtcaacaccccatctctgcttttgcttttcatggttcacttattccatggttcagctcattgcatcatgagctgtcatgatccaaaaatggaagtttccaaaaagaaacaagtttcaaatcagtttgattataatatattatgctttattgatgtcttactgtgtccaatttataagtcaggctttataatgtgtaggcatgtgtagggaaaaccacatttagtattattcatgattttgtgtatctactgggaatgtaaaaacaaatcccccactgagaaataagtggagacatactatgttttttttctagaaagcaaaagtttgtaagtaactaaatttaaaatagaagcttatcaagttattttatagtttgtttccacttaaatttataaaactagtttaataatatttatatagtgttagccaagttggatcaaacgtgttttttttaatttttaaatttttattctatttgaattatgtgagtgttttgcctgcgggtatgtctgtgtaccatgagcatgtcaggtgcccatgagcatgtcaggtgcccatgaagttcatagggaactggagttacagatggttgtaagctgtcatgtggttgctggtaatcaaacataggttctttgaagaccagctagtgctcttccaccagcacactgagccacctctctagctccacatcaaacctattcgaagaatagatggttttggtaaatttagtagcagtataaaatgggttagattcaatctcggattatcctatgttttcatttaaatttgactcaatctttaattttttttttagcttcaaagactgttctgttcaaaattaaaatagatcagatacagatgttttaggaaattgatccttttgagacagggtctctattatttagcctgggctggcctggaacatactatacagaacaggatggcctgaactcacagcgattcacctgcctctgcttcccaaaagtgctaggattaaaggcgtgtgccaccatactgggctttggaagtttgatctttttaaagactaagctaggggttagagagatatatagccatcttgtaaaatatctgaaataagttcctgactccgatactgggcagctcttgaggtctgatgtctttggcttctatgagtacctatactcatatattcctaaaacacagacacacagacacacgcacaaacacacatgtgaataataaaataaatctttagaaaattgatgtacctaatttgattcctggtgtaaatattaaaactggttccccttttgatctcttataatttgctttcataatagaaaattgtactattttcacatctgaagtccacattaatacaaatacttgtgactgctggttcaaaatatagtcatcatacacatgtattaaaatatccctgtactgtatatacatcatacttattatatgttaattaagatatttaaatgaaatgatttagtagatatacatgctaaccatgatttggtcataacacattgtatacatgaattgagttattgtgctgtattctacaaatatgtacagataatagttgaatattaattcaactcaacattgaatattgagtagacatacatgtacagaaataataattgaattttaaaaaacatttttgtgctgttttttagaaagagtatagggctggagattaagcatttgatgctattgtagagaactaaagtttggttcctagcattcacatcaggcccctccatctgcctgtgactccaactccagggatccagccccctcttcaggccttattggaaatagactggataagcaataagaacaaaatacttggaggtgatagagtgtgattgaaaagcccatataactattttcctagtttttcctcacttaattctagaagtgaatttaacatcttttgtgaaaagttctaagtagggactagtagtgtgtctcagtggtaggtggcttgcttggcatgcatgatgctctgggttctaactccaacactacatttaaaaaggacgaaagagccactgcaaggaataactattgtaggcaagcttttctatattccattacttcaagatgttaacgatgtatttatgcagtgcccttttatgattagagtggccatctatgttaatagctgaggattaagattcatgatctgattaatacaagtatatgagtatactggaactagatacttgaaatacttaaagatgattaatatatactgattaacatagctggcttctattttactttctaggcttctgaagccaatactgccatctagtggtagagaagagccactgcagtgcatactgtataaggaatgatgattaaaaattaggttttttaaacatttatttagtgtacgagcgtgtgtgtgtgtgagagagaggggggggggcagacagacagacagacagaaactaacttgtgggagtcagttttctcctatcatgtgtaactcaggattgaattcatgtcttcagccttagcaagtgcccttttctgcctgaatcctctcaaagacgcaaccaaaatgattttgagtgccttttgcttagtgagagtgttctaattctacttcatattttacaagcaacttcaaattggcctgattttggttcatggtctacttctgtagaatattggtcccttttgtttccttggaatatagtgtgtgtttatacttacattctggaatttgaggcataatcttcatgtattgcagtttttgaagatatattttcataattatgtcctgcatgtacatctgtgtactgcatgcatgcctactgtccatggagaagatcagaaggcggctcaggatcccctgtagctagagttcttgagttatgagctgctgtgtgggtgctgggaagagagtcagtgctttgaaccaatgagacagacagctctccagccccagtgttggcattatttatatttagagaatttggctttttagctcaaatttattttttattgagtactttgtcagaaacagctaagatttgttctgatgggaaatgtgttctactttatgatggtaatttatgatggggagttaaaggattttatttcaggcattctccaagaactatacttcattggtctctagggcaaaggacttgatacctgtgacagtttctttagcatttactatctgtagctcaatatttctgatactaatctgtcatgttagccttatgcaacatgaagtgttatgaagcactaaattcaagaatagttttataataaagcaatttaattttccaaccctaagtaaaatattatttcatattaaatgcctgaaactcatgtcatctgttttggaaataaaacttgggaggttaaatctagtatccgaatgagacagaggtatcagaaatgacaccaaggtttttgatatacttgagtcagttactgaatgatgctatttaagtaggcagtgttagacttggaaaaggcttatgaagagagttaatgagttaaactttggaaggtcaagtctgagatatattacgccttatccatgtagggtatcagctaagtggatgggtgggttaatatcactctagttttctgaatagagaccttggctaatgataagaatttgccactgttggtcagtatatctcagacagtagaggaaaagttgcctatagagaaagctcggaggagatgaaggcctaagactgagtcttgaaggctgttaatggttgaaggatgggcctgcaaaggcagaggggacgtgggtagagagaaggaggaaagtcagcttagtgttaaagctgtagggtcgaagaaaggtggagtgtaatcccagaaggaactgaatggttagttttgttcttgagaaagcatccactggctcaatgactatagagccattcgtgatttcagagaaggctttggggagagaagtgtgcccacagaggccagaagaaatcattggagcctctggatccttgccactagacaagcaaaaagatagcattgaaggccttggaactgaagttatgtacggttgtgaatttctatatggatgctggaaattgaatccaagtcctctgcaagaggtggtctaaactgctaagccatctttctagcccctgattaggtagttctaagttcataaaaatcccctgtgaacatgtagagtctccttagcactcaacaatatagagtaaagcagtgcatttgtttcagtctgtgatacaacacggatacatgattatcacctgaactccctacattttataaaggttcaatggttatgtgaaacatactgtggattttcacacatctgtaatgatgcatacccatctttacacacacaaacacacacacacacacacacacacacacacacacacacacacatgcacgcacaggtggaattttctttgatgttctttctttgcattacctagtgtggtagctatgtgtggtattaagtagtgttcttaaaaattatactctttttctattattattattattttttttgagacagggtttctctgtagagccctggctgtcctggaactcactttgtagaccaggctggcctcaaactcagaaatctgcctgtctctgcctcctgagtgctgggattaaaggcgtgcaccaccaccgcccggcttctatttttctattcttaatgggatatttatgcattaaacatggataagagttaccagaatcaagtccactgtgttttgtcatgttgtgctgttttgaaacagggtcttactgtgtagtccaggctggcctccagctcagtatcctgctgctttcagtctgagtgcagacactttgggcatttgtcactatacttagctaagccctacaccttctgtgtttgcctgtgtgtgtgtgtgtgtttggataagagcaatattctttattttaatgttttaaagctattcactttatttttgcacattttacagtttttttgtatgtgtttgtgatgcacaagtttgtgtgtacatgcaggggctaaactcagtatattagttagggttctctagagtcacagaacttatggatagtctctatagagtaaagtaatttattgatgacttacagcctgcagtccaattcccaacaatggttcagtagcagctgtgaatggaagtccaaggatctagcagttactcagtctcacatgggcaagcaggcaggcaaaggagcaagagtcccttcttccaatgtccttatattgtctccagcagaaggtatagcccagattaaaggtgtgttccaccatacctttaatcccggatgaccttgaatttggagatttaatctcctggaacccatagtcactatgtctcaagatctccataccaagatccagatcagaaacttctatctccaagcctccagataagggtcactggtgagccttccaattctggattgtagttcattccagatatagtcaagttgacaaccaggaatagccactacactcagattatcaggcttggtgacaagcatcttaacccaatgagccatctttctggcccctttttactcctttgaaaagcaacattttaaagatagtaagcatggggtcagagaaatggctcagcaattcagagatctgggtcttcttccagaagatcttggctcactacccagcacgcacatgtcagctgtctgtaactccagatccagaggagctgacactttcttctagcctctgcagacactgcacatacatggtacacagaaataattacaggcaaaatgcccatacttggacaatcaaaagagatacaacttcaaaagaagcttaaaattaataaacatggtgctggaaaggtggctccgtgctaagagcacatgccgttctttcagaagacacagtccccagtacctgcatcaggtggctactcctataactcaagctcctggggatccagcatcttcttctggcttcttcaggaaacagcatgaatgtgtacacatacaaaaatacaaaaataaatcttcttaagagatgttagtaatagcaactaggtctagcttataactattactactattctatacttaaagaagtaacttgatagcacaatttgtaaccactaagcatttgagtatctacaaggaactatgattatgaaaggtagtttatttaagataatttttaggttgcagatatggtcacttgaacctttggctccagcactcagtcaaggtaggaggaatgccatgagtccaaggtcagctgagactacaggggcaaacatgtctcgaaaaataaaaagtttaaagaggtttggagaaatgctgcagttgcagagagcctgaatttggttcccagcacccatgtgattcctcataattgtttataattccagttctcagggctccaataccctcttctgacttccttctgcgtcaggcacatatgtaataaacatacattcatgcttgcacatctatacacatagaataaaagtaagcaaaataagtaaaatagagtaaaaattgtactagacatattctcatcagtgatgaatgaatagtccccttcttacaattagaaaagcttatttaaatattgcttatttaaatcaccaaataatacagaggtgttattaaaattagtttaaaatttttgctacatttacttatgcatgcgtgtgtgtgtgtgtgtgtgtgtgtgtgtgtgtgtgtgtgtgtgtgtgtgttttgcaggccatgcacatgccacagtgtgcacacggaggtcacaggacaaaagagggctggctctctccttccaccatgtggaccctagggactgagctcaggtagtcagggttggcaccaagcactcttacctactgagtcactatttcacaggcccccacatcaccaccaaggtgaattaatatttggtctttataccattttgaatactacattatatagtgaggttaaaaatgtttactgtgtgtatgtatgatgcatgtgtgtaccagagagcacctgtggaggtcaggacaacttaagggtattgttttgttctttccaccattatgttggttctgggaatcaaatttagggtaccaagcttgggtgcatgcaccgtcacccaatatgctgtcttgtgggccattaataaataaatacttatagtgaataactgagtgaaacactgttagtggtagaattattttcttatttatgggaaaaatcattgtatttctatgagtttaatgaaaatgtttacagctaactcacaaaatggctttttcttgccatttcttcttgttagagcttctttttgtacttgggacatgtttcattacttgatgagttagctcaatcatagatggctttgaagctgaagctgtccattcataatggaagaactgtctatatcagtgctgtgcagtcgaagtgcagtgacggaaggaaggaagcaggtcaggctgacactgttgcctctggcctggtatggctaattcgtttttgagatctggtcagtgtgactgaaaagtgagattcttttattataactgacctaatcgtgtttaaaagccaaacaacctgtatcacagaacccatttttacggaattacagaatcaaagcaaatgaggttataatggttccaatcaaaaggtctgtattcagttatttgaaacactggattgagcccctttgagtagaacatagaccaggtaggtatcctcgtttctaggggccatttcatgctagcgaaaagtgtagttcctgcagactcatggacctactgctgattgttaaaactgacccatataaatatagcttttgtttctttttgagcagctgatttagaagaaagttttaatgagcatgaactggagccctcatctccaaagactaagaagaaaagtcgcaaaggaagaccgagaaaaactaaccttaaaggcttgccagaagacagcaggtccacatcctcccatggaacagatgaaatggaaagtagctcctacgtaagtcaaacctggtgggctcccaccattgccggcaccctgaagactttcacttgaactgtgtctacagggaacttatactgtttgaagaattaaataagccttgaatccatttataagtggtttcctccttttatatttacagcgagataggtctccacacaggagcagtcctaatgataccaggcctaaatgtggattttgccatgtaggggaggaagaaaatgaagcaagagggaaattgcatatatttaatgccaagaaggcagccgcacattacaagtgcatggtaggcatggttttcttatgtatttttttcaaaaatcatttagctggtaatctaatatggtacttttgctttaaacattgttttagggctttgcatagagaagtatagtaaagtatttctttactcattgctttgacagaatacataggcaacttaagaaagggtttccgaggagtggagtggtacgtttgcctttaatcccagcactagggaggcagaggcaggcaggtctcagagttcaaggccagtcagagcatcatagtgagaccctgtctcaaaagacaaaatgaaaaagaaaagaaaaggaaaatgaagggagggcgggcacgagggtaggtgggcttgtttagtttggattatccggcaagggggagtccatggtgatgggaagtgaggtgcagtggcaggagcatgaggcggctgctcgcgctctatctacaggcaagaagccaaggaccccagtccacgaaatggtgccacccatatttatagtatgtctcctcacctaagcctaatctataaattccctaacagacatgcctagagatttgtctccagggtgattacagactgggtcaaattgccaatgaatacaaaccatcacaagtaatatgttatgctctgaaaagtttttcaagacagggtttctcagtatagccctgaactgccctggaacttgactaagctggtcttgacctcagagatctgcctgcctctgcctcctgagtgctgaaattaaaaggcatgtcccaccactgggccccaaatcttaatgtacttcagacttattaaaaaaacaggatttgaagtaataattatagttaccatattgaaatactcttaatttatagtataagaatttaattttataatcatcattaaaaacatttatgaatatgtataaatgtcttgggcttcaacttataacctagtaaatatcactgttatggtacttaacacactgtatttcagttatttataaattttttttttcctaatagaccctaaagttccttggagagattctgacctgatcttttgagctagatttattgaattactcatctcacttaggattaattttgaaaagttatttatataagaagttgttgcctaagtgtaaagtcacaaggctgagaacctagcactttgaaacctgaagcagaaagaatgtctcaggtttgagttcaaagctaacctatagcacatagtgagacactgtctcaaaagccaaataaattgggcctatgaaatggcccaggcaggtaaaggcatttgctgtctccaggacttggatgtcagaaagaactgacaactgccagttttttgacctccacccacataaagagtcacatatagaaatatataagtataataaaaaatttaagacaacccctcaaaaaagtctccaaataaacagaaattctgtactagagtgcatattagattcacccagaattttctttttcaaaatatatatcttaagggacccccatggattagattctagttatatatttgttttggaaatagaaaataagaaagtattttaattgtatcattaattgaaatttaccaatttaaactatttttcaaaatttgggggaatattaaatagttaggcaaatagggtgatggtattattgaagtctttgttatttaaagctgggtattagctccagttggtaatcttagttgggtttttaattgtttccattttggcttatattgtaatgagacaggaaaatgtttaaaatagttgatactgattatttaggcaaagtctctggaagatttcgaaatgtaacaatttgtaattgtgctgtttaatctttccttgtaagagctgcccagtggtgatggtttgtggtattcttttgtagttgttttcttctggcactgttcagctcacaacaacatcaagagcagaatttggagatttcgatattaaaactgtacttcaggagattaagcgaggaaaaaggatggtctgtgatttttttttatatatttatatgtatttgtattatgccgtgatacctttgattcttgctttaaattaaggatacatctcctatttatccagttattaagaatgttgatataaagcacttcatagttttaaatataatctggtcattggtcactagctttaagaactacaacttgactgcagagaggatcagtggagtgcaaacctttttttcaagttggttttgaaaaatttcagactggtaacaaacaatacaggtccttaccctgattcatcagttaccaagtccttacgtcacttgtactttcaattcttgttgcttctactcttttttttcagcatttgtttgtatgtgtgcatgtgcgcacgtgtgtttgggctgctttgcgtctatgtgagtgcatttggaggcaagaatcagatgtcaggtgtcctgccctgtctctctttaccttgttcctttgatgtacagtttttctctgaacctggagctaggctggtgggctgcaaacttcagtggtcttcctatgaaatgtcttctgtgcttcttttccatttttagattttaattttaggtctctgtctctctctgtctctctgtgtctttgtgtacttgtttatgcatgtgcctgcagaagacataaaagggcattagattccttacagctggagcaacaggaggttgtgaaccacaatgtagaatattgaaccaaacttgaatattctgcaagagtggtgtaaattctttaccactgagcctctctccagctcctacattgattcgtgtgtgtgtgtgtgtgtgtgtgtgtgtgtgtgcgcgcgcgtgcacgtgagagaaagtatatatgtatgtatttaattttatctgtatgggtattttgtctgcatatattcatgtgcatgaaatgcccgtggaggtcagacaatgagtttgggtactgtagaactagagctaaagacagttgtgagccatcatgggattgctgggaattgaacctgggtcatctagaaaaacagctagtgctcctgagccatctctgtagccccctctacctcattttctctgacttattgaagaactcaaactacattttttttgctttttaatcttgtttttccaccctccgtatttatatttaaagtgggaattatagaggcttgagagacagctcaaggactaagagatcatactgagaggacctgaattaggttcccagcacccagatcacaactgccagtaacttcctgtaactctaactccaggtctaacaccccgttctccactggtacctgttcttacgtgtgaacatttgcccacatagatacatacatataaacctaattaagagtaagaaataatttgaaaaattaaataagaggttggagaggtagatggcttagcagttaagagtactgacatttcttacaaaggacttggatcagtctccagcacccacacagtgatcaactgtctgtaactttagttccaagggttctaggcattcatgtagtgtgtgtgtggtgtgtgtgtgtgtgtgtgtgtgtgtgtgtgtgtgtgtgtgtgtgtgacagagagagagagagattgattcagtcaaaacactcgtaacatatttgcagaagatggcctagtgggccatcagtggaaagagaggccccttggtctttcaaactttatatgccccagtacaggggaatgccagggccaagaagtgggagtgggtgggtaggggagtgtgtgtgggggagggtatgggggaccttcaggatagcatttgaaatgtaaataaagaaaatatctaataataaaaaaagaagaagtaaactaggaattacacataaggacatgaacagattcagtttcccctcttagagacataatactatcccacaggaaggactgtagcgtcccatgtgggcctatctggtccataatggctgtcctggatgagatggtccattttccccctgctatgcagttcttcaggctttcctgtgggagcttcagatggttgtggtctttgtccagctccactagaaatgactgtttctttgtggaacttcccatgttaaagtgaaaatgatctgttctttagattcgggtcatttgattgttaattttgatcactttgaaactaaaatccttagtactaaaacctagtcgtcttgtgcagcaagcagtgctgggttgtttcgcagaagtctaagtaggtgaatgggacaaaaatgtagttctcttcatttgaaaaggttagggtgaatgctaacctagcaaccccctacatatactctagtagaagttagtccatcacaatcctcctccgcctctccaataatacaagggcatctgaagttgaataaacttgctatccatttactatgccccccttcctggagaagggctttgaaacattctggaaaagagaatgtttgcctcctgccagtcgctcttactgcgcatgaacctgcctttccagtgggcacctgttcctctagcagctttctttaggaggagcttctctagactccactgagaagctctgaaaagatttctgccctgcccatctcccttctgtacactgcagagaacctcctagtgcagagattgctttcctgtttttctcagtttttccaatcataataggaaaggatctgattccaggaaggaaagggagtcaaaccactaaaatatacaatattattctttttgtgctagtaaagtgaaggagtgtcatctatatttagagtccaactttacatggtgtcatggctttgattacatgccatataagttaacgttgttggtgtaatttttgccatagaaaatgtctactgtttttcttctattcttaatacttattttcgtttatgggtatgttggtctgcctggatgcacacgtgttgtgggtgaccatgaaggccagaagaaaggtttcaggtacacagagctccaggcagttgtaagctgcctgcaacctctgagtaccaggtagcgggagttagaggcatggggagctatgcagcatggttgcccggaagtggactctgatcctctgtaagaacggcaagtacccttaaccactgggttactgcaccagcccctgactgctctcttctgtgtaaactgaagtaattggctaaaaatagaatacatatcattgcctaaaccttgaaatattgcttctgattgttctttctttcttttaacagaaatgtacactttgcagtcagcctggtgctactattggatgcgaaataaaagcctgtgttaaaacctaccattaccactgtggtgtacaagacaaggcaaaatacattgaaaatatgtcacgaggaatttacaagtaagataacgagtgtccattttccttaacatgtcagtaagttagtgcccttaaaaagataacactgagtttttaaattaaattatttattcactttagaacccaatattagtccttcctctccttccagtaccccctcgtgtaaatccttcccccatttcctcttagaatgggaagccccctcttggtgtcacccttcacccccaccctgcatatcaagtcgctgtgggcctaggcacgtctcccactgaggccagacaaggctgtccatttacggatgagatccatagacaggcaggccagcaacaggttcagggacagcccctgctccagttgttgggggactcacgtgaagaccaagctgcacatctgctacatatgtacagggacctaggtccagcctgtgctcactctttgattggtaaagttcagtctctggagtccccaagggagcactagttttttgaatctctagttttgatgatgttccaaggaaatgtagaataccaaagctattgtataaggagtgagaggtacggtttgcctctttccctgaaggtgtgtccctgggctagcactcattcatctgtgacctatgcgctaggcagtggactggagctgctcattcacaagactgtcctcagcaagcgtacagcttattgcgctctctcaagggctctccctttgaattacatggccagacaaatcagtgctcagttacaagttatatcaacacctacaagtagttacaaacacctataatattgaagatgaaagggctaacctaacctgtgctaagaagtgtttgagtttgctcttaggagtttgagctgagacataaagggcaaaggtgaacctagtacaggtgtcctggtgtgtgcataacagataagtacccccacactgagagaactctagctttgggactttgttttgtctttattttattttattaagacaaggtctcagtgtgtagcccccactggcctctagctcacacacatcttccaccttggtgctgggattaaaggcatttacttactttggcgtctaccttcacaactgcacactagtctaaagtctcaacagttctcacctggactactgtcaacagcctgttcattcttcttgtctcctttttgcttctgttcccctgatatcctcagattagggtgtgtgtttgttgtatgtaagttttgctttcacgcctcacataagagagggagacagaatgtattcggaaattcaggatgcccatcactctttgtaatgggatttctacttacctgtgtatctatagtggctccattatttccatcatgcagagtaattggataggaatctctgaacttgatgtgcttttgagacttgtgaaacactttcacagggttaatatgtagttaaacgataactaacattcaattaaacagctcctttgggctcttgtgtttgtggataaagcagttacacattaagtcatcaagccctttgggtgcccacagaagcattctaatgctatcaggcctttaagcaacagatattatgaagattattatgtagacatctaacacaaagcaggaaatggaagacttctactttattgtgtaaggcatgcttagctggaatggcaaacaattcaaatcagcaaactatacctgtctcatcaatatgaattacaaagtcagtataaatttttatatatagtcagtataagttatagacatccaacccagctctgtaatatgatactaaaatttgaaaataagtgttcatgtgatctattgtaaattggtaaagaaaaaccatgtcaccacctcccaggtaaatggtgaaaggacagtttataactttgagtgtcaactcagattcttagattattgtgtcaagggcacttttactaagttgggaatcataatagggtgtccagaagaaatcaacaaatagtttatttattgttgaagtaaaagcaatagccctaacccagggttgggcctcagaatcaccagacttagactgggcctttttggaattgtctatgcgtgtgtcctaccacagatgctttaattcagtaggtttgcaaagagggtcaaacttgaggcaattcccatgttcatccctaacagaacaattagactacacacatattcattcagattaggaccaagacaaaggtaccaacaccaacattatcttcaacatactctgtagagttagctcttgcaacaagaaaagaaagaggagctagagcgtagctcaacagcagcacagttgactaggacattcaagaatccaagttttgttccaagcaccacaaaaagaaaaacagatatataataaatgcagtgattggctcttgttaggtgattatctactaagaaaatgcaaaagaatcaagtataaactcaggagaattactgaaagcacatcaagattgcataatatgagatgctttttaaaaggcaattccagtcataattgttttgaaaatgtaaagaaaaatgtttctttcccctctccctatgtgcacgcgcatacatgtacacactttctccaactttaaaagcacttgcattttgctaagtacccaagagagctatattacattcctcagtagaaggacttaacattgaaagattcctggtcactgggcagtggtggcgcacgcctttaatcccagcagcactcgggaggcaggggcaggtggatttctgagttcaaggacagccagggctacatagaaaccctgtctcggaaaagagagagagagagagagagagagagagagagagagagagagagagagagagagagagaggagagagaagagaggggggagaggaaagggaggagagagagggagaggggggagacagagagagggaggggagagagagaggagaaagagagaggagagagagagggaggggagagagagagaggagaaagagagaggagagagagagggaggggagagagagagagaggaaaaagagagagagagagagaaaagaaagatacctagtcatcaaactaatgtaaaaaccaatataaagttaagcagagttttgtctaaacagtaatcagagcattattaaaaagaattaggaggcacacagaggaaagatgtcagatgtgggaggcagttgcttaaaatctgtcttccatttgttgtatctgggacatttaacaaattctacatctgctttatgattgtatggtttttttcattgtattggttaatcacttttttattggctcctgttttagacatttagattaacttcttggctgtcagaaaatcatgtttcagggctgggttggcttagttggtggagacttgcctagcatgcatgaagccctgaattcagtccctgtcacagcataaaaacaggtgtgcataacactttgaatgttgagacaggtatttagttagctgttcaaagtcatcctctgctatatagcaaactcaggccatatgaggctacatgagagcctattgtctcaaataagcaaaggaaaaaaatcatgtttcaagctgagcggtggtggtgcacgcctttaatcccagcacttgggaggcagaggcaggcggatttctgagttcgaggccagcctggtctacaaagtgagttccaagacagccagggctacacagagaaaccctgtctcaatcctaccccacaaaaaaaaaaaaaaaaaaaaaaaacatgtttcagtggccacctctaaaaagtatttggccatgctaatttaaattgttctttaaactttgtccagtaaaatatacttcttatgggctggagagatggctcagaggttgagaacactgactgttcttccagaggtcctaaatccaccagtggattacaacaatgtataatgagatctggtgccctcttgtggcgtgcaggcttatatgcaggcagaacactgcatacatagtaaatgaatcttttttttaagacctttttttttagatttatttatttttgtgtgagtacactgtagctattttcagacagaccagaagagggtatcagatcgcattatagatggttgtgagccaccatgtggttgctgggaattgaactcaggacttctggaagagcagtcagtgctcttaaccactgagccatctctctagtccccccgccacccccgtaaatgaatctttaaaaaaaaatttaaaaatctaatatatatatatatatatacacacatatatatacatacacacacacacacatatacatatatatatatatatatatatccttcaatccctgcaatatctgttccagatagactgttgactttgaatgggtgtcttcatgcgcatagattatggagagaagtagtcaaacaggttcaaatgcaaaggaatatttctgaatgaagtaacatgtggaccacttaaatatggcctttcttctttaactgccatttttaaattatttgttgttattttatggacatctgtgttttgacttacgtatgtctgtatgagggggtcatatctcctgaaacaggagttgcagatggttgtgagctaccttgtgggtgctgggaattgaacccaggtcctctggaagaacagctggtgttcttaaccacctagccatctctcctacaccctcaaaaatagctgttttagagctctaactttatagttggaaaggcaagggaagttgggcatggtagtacatgccagagagatggggagcgggggagggagacagactccataatagttcttatgtagaagagtaaacatttagggcagtccccaccctatcactctcacctctcccctcctttgtaagcatccttggaaaagtttccaaattctgtccttatctgtttactgccctgattcttactgtgtttccgcttcctcttcacctttgctgtaaagtttaatttggttcaaatgcttaagttagactggggctatgtttgggggaagatgcttaacagatgatggcactgcctaaagtcctcgctctggatatctgaacctgtggtttaaaaataattaatatacatgatgcagtcccaatgtaccgtatttgaagaggagtacagattatctgtgaagctactaagtgttttacaacatgaaggaaaataatgaacaaaactagattgacaatctgggcaaggatggtgcacgtgtgttatcccagcactcagaatatggaggctggaggatcaaggtcagcctcagctacagtgagtttaagggcagcctgggctagctatataagtctgtcttggtgaaacagagcaaacaaacaaaaaagtcctaaattaaggatggcaggagacatagctcattgctgtcactcataccgtcatgagtctgagctagcccacatacatattctaggttggcccctaggactgcctgttctctttggctacataatgagaccacatctcaaaaaaacctcacagagctgtattcagttattataataccccaagcccatcattgctttctgttctattcaaatgttccttgtaaacctttggggagtaaatgcctatttttatccagaactgaccacaagagagtactgttctatttttgtctaatgtagaagttacctgaaaccaggtttgagttagcccaccattagcatcttttttttatcctcccttctttttgttactatatactaactgaataagtgggttttgttacagcacacatataatatactttgatcacactcagccgttactttcttctgcccctccccccatccttaataatcacccttttagtttcgtggtcttttccagcccgtaacctccacatacttggtcttcatggaattgatcttaattaacaggatggtctccacttccatccattttcctgcaccaataaaaatgtattcttgatagctaagcaaagttctagtgaacgcatatactacattttcttcagatcatcttttctgtgtatgtgcacatgtgtgcatgagtgtgtttctggggattgaacatgtacatgctagataaataagtctactactgaagtatattcctaggccttttttcttttctcatcacccccccccccatttttttttgagccagggtctcactgggttttctagtcaggccttgaacttgcattcttcattccatagctaattatcaaaaggcacatacatatacaaggacacactctgccttggtcactgctaccttaatgacatgaagtatagcatcattgataggggaacattggaagtctcgtgcctccagaagtgagcaggattagttatgcagtatgctggttgatggactaaagatggacctgtagcttagcaaactcagatttgattcctagtttatatgaaatggagtaagagagaagcaaagaaaatggcattagacaaatccatagtatggtgcagctgacaagctgtctgtttcagtcgggtctttaataggtcagtgttgtgacatgaaatgaaattgggaggtccagtatagaggaagagaaacatagccaagtaagatgcaggtggaagagctgacccatgaagagattgtagggaaggcaaggacgcttgtgtgtgatgtgacagcattggaagactttgaggaaggctgtatcaaaataaaagcagaaagcaacagtgtatagagaatagatattcccttccctctgtgtgtgtgtgtgtgtgtgtgtatggtgtggtgtattgttcgctcatttgtgttcttctacaatatttgtgttcttctacaatgtgggtcctggggattaaacactggccagtggggttggtggcaagcacctttaatccatcccttggccagagagatgctcagtagttaagaacactttgtgctccttgagaagatccagtacccttctttggcttttggctgaacatatacacacagacaaatacaaagtagatatgttttaaaactgtatctcaaaatatagttgtaaagtatgtacatgaaataactttgtggcttttaattagttcattagtttacctcaaagctgactcttggattttgtttggaattgttttaaaacacagtctcagtccagaacccaggctggcctcaaactcaccaaagccctcctatccataaaagttgtgttttaaaagaaatttcataagtctattttatttatttgttgggaggcacatgtgtgtggcatggtgtacaagtggagatctgaggacaagttctgggtgtctgttgtctccttctgacaataagcatgtgggcctattgtcaggtgccgttatctgatgacatatgatactaagtatgaaggagcaaacccatattttataagagacccaacatcctctgctagtagttatataattatattcttatcaacattagaagaaggatttttgagatgtttgtctttcatcattgtagactctattgtaaaaaccatagtggaaatgatgagcgagatgaagaagatgaggagcgagagagtaaaagccgtggaagagtagcgattgatcagcagctaacccagcagcagcttaatggaaactaggtatggaagttgatttaaagctctgttgtcggaacaccgtgcacactaaaacagaatgatgagatgcagcaaaactattaagcctattgtatagagttcctaatgtggggccaggatgcttagttaggattctacaggctgccctgtagagttgtatttgcttttctttacctggtccgttttagagccataaacaagctatctacttcatcagtaaacatagttaggatatggcattagtaagatacccttgttccttaataatgttatgtcaattatatcaccttaagcatcatattttacttttttttatcatcttttaaacaggttcgtgggacagagagagttagaaaactgagaaaaaacaactataactcctgtgcttcttttccacttttttctaaaataaagggtttgtaactttttactgcccgactcttagatccttcattgaactgcctaaatcaccttgttagttttctgagccttcagtagacggccgaatttgacatattgatattacgtagctgtagtttgcagtttctgggaagcagtcaaaacactattagccctgtgtatactgtcagcagttaaaacagacattgaatgaagtaaactgtatttctggacagaacaaagttgtactgtttagagtatgtaagtttgtgtagtagatccacgctcaaaggaaaccagaagcaagttgtactccaccttgcaaacatgcctctggtagcaacacctggcaatttgggcaatggaaacgacaaatgaagagactcttctttttgtcttggctttgacagcacatgctctaaccatttctttcacgaagcgtgctgaagcctacctgtggtcctttttagagttattctcactgagcagcatggactctgggcgactggtgatgataagctctgagctccagtgcttctgccaaaactctggacagtacacctttctgtgctgtacagagagcttctggcaaaataatggaatcgtatcaagatcaaaataatgtttggcaacatcagattaaacctctttgaaattcaagaggtcagcaatgcgctaaaggactttggacatcatgtctgaaaccagcttctctcaagtgccctgttgtgtggaacacttcacatattggcccagcatatataaggaggtcttatatgctaacattttttttaaaggaaccatctttgtgcaaaacagtatttctttttgactctgtgaccactattttagaaacattatttaatgctttcagtcatcagtttgcttacagattgaataagcttttgtgccctgtttttcttcgagggctcggaagtgttttctcaatcaccagatttttagaaaggctttctttccactggcatttctcactcgtgacacacatccacttacctgctgaagcacatttacatatttctttatggcaaaaccaaaaaagttagttgtggtctgcctaatattaccatagcacctcagtatgaaaggtaaggattctgagttccacatcattagttaacctcccatagtgaatcagatttgcaaataagaaataacgtactaacttgactgtacatccatctattctgtagctggtagaacagcgttttgaaatgtaacaggtggaaaattacactgtgcttattgactgaatttttaaactgcttgtcccttaagatcatgtttgttaaggtgtgtatttacacatttacttaaatcaagggactcaatgcttgctttcttttaaccatcttttattgttattttagaaggaaactagctttagtggattgccttgtgcgtcttctcctttcgctcttaatatgccatgatgtgtatgtgattaattttcaaggttcatcatgacttgaagtgcaaggacagatctcagtttgtttaccaagcgatgcgacttttcccaaaggatctgtactttatttccttataacagcttgaaaaccattcttttttaaatctttaaatcactgtgtctaggtaatttttccattgtgtgccatagaacttacccatggagaaatggagccccttcatttttggacaactactgtaatgattttttttaagaaaaatggaaggtgccaggggtaattatggccagtcaataattatataaaggacttcaaatactatagccgtcagttgatggatttgatatgtagtacatgtatgattttgtatgggtttcttcagccctttctctgccactagcaaccagaaaagcactttaccttttggttggttagataagtggctaactacctgtttttctcactgtggtgtgattggctagataaccttcatttaaagttgaaatgtaaactgaagtcacattaaacactcacgtttggctgtaaacttccaatagtttgattctttgttcctgttttcattctatgctgagtaaaagtgccttacaatgtaaaaattgtacagtacttacgttcccaagtagcagcttcaccatctggctaggcgtcacattgtggtaggagtattagatcaatagacctcagcagtgtatttactgtacaactcttaagtccttaactgtagttttaataagcatgacattatttggcaaatatatggcatttacatcatttccaaaaatactgccattgctgtctactgcgtatttttagcctgaaattttgatgcgtctttttttcttgtttttttttctttatttcttttgttcccttttgtcattattaatattaaaccgtgtaatctttgcaagcgtatattgaagattattctggagcatttattgccttaccagaaatgttagtaagaaatgttctttagagtagaagggtagacttgagtttctatactttaataagacctctttgttcctggggggaggggggagttttgctttcatctcattgttttaaagcccacacaagaaattaatttcatgtcaaggatcagcagttttcaaacttgaggtggttcttagtacacacgactcaagatactaacagagtaacatgatctacagatctgctattgaatcgaatctatgtacttgaacaaatgtgtgaatctcaaatatctcaaagcaaaagtgttgtagaatgttgttgctttttgaaaaagcactgaagttagaccaaggcacagttttgttttagcagacatttaagttaattgtaaagataaggaatgcatcatgggtcaaaaatcaaacattcctcaatgttatgtatattttgttcctgttatattggctttattttcaaaattgtagtttgtagtattagtttccttttaatggtattcttgcatatactattcattcaataaatgagttctggatttcaggtctgtgtctgctttgtaaaagtgtgtatcgggttatttgtaccagcaatagtgccatgtttctttcactcttcctttacttcaaggggaaatacaaatgcctaggatgtttaataatagctcgacagcaaacagatatgagagggggactagcgagtagttccagcatactcttagccttgacttcagtcccctggtatggtagataaagcacataactcaaaatgcggatggactggaggggtgtggttaaacaaaaatgaatatgatctgcccagagtttcacaatataaagatgtcatcatggaaagaattagcagcctttgaaagacagtagatttagagcttattttggtccttctaatacatgatgcagatccccatggcttaaatcaagtccactgcctccaaatcagtatgtaactctgaaaatgaacacaccaaaatgcctagtacagattatttgacaggtaacaggtctttgagctattccacatcatagacttaggttactcccttttccacagactgcttgctgctgagctttgcacatctgttgtgcttgatcctacccaggtcagaaatcgaagttttgattcctggacttcacttttcccagacagtttctaaacctgcattcgtatggaaagatggccgggacacacagtagtatgctttcctatgcatcctaactacctggcacattgtgtgtgtgtgtgagagagagagagagagagacagacagacagacagacagacagaggtagagagagagagagtatttaaaatccatgattaagtaacaactaaaagactataataaaaacataaaaatgagttatatggttttctttacctagttacacctgttgacaacttgctttttgtttcagtctacactccctagcaatttctgaaagtcatacccaaaccctattactatttcctagcaaaatttaatgacagggtcatctgtctatttatcaagataaggtgtcatacagcataagctatatataatcaagggtgactgatctactgattctcctgcctccatctctccaagtactggtattacattacatgtgtgtacaatcatgcttagtttacctaccaggtccatatgtttttttaaaaaaggagtgtgtgtacctgcatgtctgtatatgtgtgtgtgtgtgtgtgtgtgtgtgtgtgtgtgtgtgtgtgtgtgtgagagagagagagagagagagagagagaatatgaaagagagagagagagagagagagagagatgttccagttcccaaggaatccagaagaggtttccagaactggagctatgagccatatgacaggcacatgtacaacatgtaccagggaccaaacttgcatcctctgcaaaagcactaagccccaaatacagcaaagagccaggcatggtagcacaaacctttaatcctagcacttgggaagcaggtacaggtggacctctgtgaattgaaggccagcctagtcaacaaagctacataaatattgagacgtaatctcctgtagagggggagggaggcgggagcaaagtggctcataactgttatcccagcactcaggagccaggggcaggaggatcacacacttagagccaacttgaggctacctggtgagacttagtctcaaaaataaacagtggtgcacacctgtaatcttagcatttaggggacccagagtttaagaccaccttcatctacgtaacaagctcaaggccagcctggctatgtaagactcttgtctcagaaaagaacagattgcaggcttgcaaattatggctttgtctgtacctctctgtagctgttcttctttttatggtactggcagggagattaggaaaataaaagccagatggacaaggccctaactaggtgaactgtatggatgataatccttaaataatgtgatgtgaaaacaagtcctattttgggaacctgttagaaaaaaagaaactatgaagaactgttttgagtgggggggttgataatcttggaaataagatctcttactagatattaaagagcgttgctgaggcaaaaatagtgtaatatggatgctgggtttcaagatgttctgttgggatttctataaaatcatttgtacataagggtgaagtatttctgcacattttagaaatcagaacttacaaattttttttattaatttataaaagtaatttaggggcttggagagatagatcagcagttgagttcctgcattgagcaactgaaaacttcctctaattctagttctagaggatcctcgttgggcacctgcactcatgtacacaggcccacatatagatgtacacacgcatatcattcaaaatagaaattatttatacaagtagtgcgttggagagctggctcaggagttgttaatgcttgctacccttgcaaaggacccaagttcaatttccagcacctgtgttgggcatctcacaaccacatgtaaatctagtttcaggggatttcacccctcttctgaactcttcaggcacttatacccacaaatggacatctccacatagagacacatacttttaaaaaagtaatctagggtctagagaaatggttatagaccacggactgggatcagttcccagaagccacatcctgtggctcacaattgcctgtgaatcaagttctagatctggtggcctcgtctagcctgcagtcatcaacaaacacatgcacacatccatacacacataatttaaaagaaagcgaaagtaacctataatgctaaacaaagcacattctcagtgtagactgcagtggtgatgaaccttgaaaatatattaatagaagccagacacgtaagtcacaaatggtataactcaatttatatgaaattcccagagagtccaaagttaaaaaaaacaaaaaggcagattattggttgtcagtagctacagagatgggacattgaagatattaataggtatagggttgaggattcatggcctttccctcttccatgttagcatgtctattgttgttaaccttattcaactcatgttagggcaatcatattgatgagacttaatgagtatagcttgacattcctagaagacagagtctcacatcagactctctgatcctctgactcttagaatctttcaacaccctcttctgaaatgatctctgagcctttggttgtgactgaattatgagaaagaattttatgttgaatgaattttacttcagcatttttacaaaactgaagctggggatggcgtttcatgcgtgcagtccctaccatttgcctataagcctggaggaggcagaagtagaattaggcttttcagggacatcttcagctgcatcatgagcttgaggacaacttgagctacataagattcccatccccacccccccacacacacacacatctagtatgtacctagtatgcagtcttttcatatgtttaaaatgtagaaaggtatatgtgaagtctcccttttccccacaacttagtccctccaaagtattgcatcagtttccttgtacatgattttatgcatatataagatacactatttctctctctctctctctccttccctccttccctccaacctctgggtatgagttgagggttatgtatgtttcaagttgtaataagaattgccactcaaacatttcatcccattttaagttaagtttgtctgattttccactttagaagggcagccatgatggctcatgcctataatcccatcctagcacttgtaagcctaatacataagactggaggattgtcatcagcttgaggctagcctggtctacctaatgagttccagccagccaagagtagaatataagaccctgtctccaaaaaatgtaccaaaggggctggaggggtaactcagtggttaagaacagtagctgctcttccagaggacctgggttcaattcccagcacccacatggcagcttgcaactatctgtaactgtccagctttgggatatccgacaccattataccaattacataaaatgaaaaaattgtaaaatgtgctaaaatgagtggggagggggagcatggtgtggttctgtgggcttgggattttgccatgaatccatgactatatctcagcaatatgtggattatttctggaaacctgtggggcatgggtgtatgggaagaggggagagagagagagcccgcatccagccagagttcctgtgctctgggcaggcggacgtgggaggactgctggacgatttccacttggccctgggtgggcatctggctgtgtgaagccactgaccccactcagcggggggtagataaggggcatttcccataccaggttctcagactccagcattccacgctggatacagcagaagagctgagaacagaataggggccccagggagacactctcgtcccagagataaagaaggcagagggagagagattcctacgcaggcgagaggccttagtctgggccttgatgaacagagacggtctatggttttagagctttattgtagaaaggcagggggaaagagagaaggtagaaagagagagaccagccatggccaagaggagagaaggggggaaaggagagagagaagaaaggctagagagtaagaaaggttaaagagacagaagtaaaagcttagagtaagagagagagagagagcaagagggagagtaagaaaagtaaaagcttaagagagcgaggaggggccagcccctctaatagtgggcttgttatcttgttgttgctaggtaactgtgaagcgtctagcctgaaggccagaagcttgggacattgtctatgtgactgaaagccatgagcctctactgtgggggctgtggaggtggtaacttggacaggagccaggggttccaggagacatgagggaatgccttctgtcccatgtaggtaggaattaccaccaccggctttcaccgtagttcactggagactgtttgtacatagcccattgccccacagaaaccaggcactcactgtttcatttgcataagaattagaaggctttattttggctgggattggtgacttgccccagaaattccagcttttgggaagccgaatcctggagaaccaggagttcaaggtcatcctcaggtacctcatttgttcaagaccagcctgtgctaccatgagaccttgtccctactcccctcaaccccaaaacacgctgttttcattttataggttgtactaaccatggaggatggtcatttgcctttctcttgatttcagaagcgtagcgcgggctttgcaccatgatctagtgtttccagataggcttgcctctccacagccaggcttatcctgcttcagtcccatgtttggcaagggcaacatatgactgaagaacttgcatagccttatggtgtatcatgactcttagccccagtttataactgtctaacagctggtggcttttgtgaaaaaggaaagcatcatttgaacttttaacttttcagctgtttgttttgactttgcataaatactgagactagctaggaaatgagcttttgtttcatttgctaaaaatgatttttttttcatgaggcaatttcaagcaatttgaatttagcaatctctacttgtctgaaaagaagttattaattaaaaaaaaacaaacaaacaggaacctattatgctggctagtcacatgaaagaatccaaatgaacacagtcaaggctgaatcaacacatgaaattattttctaattccccaaattacatttatgctaattagtatgtagtaaaacattttaattgtttccaatgttaaacattacagaaatatttttgatgttttcctaataacccagcctttgatcatgtttgcatttatttgattgttgtcagtttattaaataattaagtaagagcaacaagataaaatgacttcatgagagtccttttctgtaacttagaacgtcagtagtcataggaactgcggtcgttcccttacctttcagaagtaggctaaagagttgaacgcaaaggtggtttttcgaatcttcctgatccttaagcccccactaggtttatattctatatttgatatcgatttggtagcactggaagcattgattctttttgtttgcttgttttaagatttctttatgggggctggagagatggctcagtgattaagagcactgaatgctcttctggaggtcctgagttcaaatcccagcaaccacacggtggctcacaaccatctgtaatgggatctggtgccctcttctggtgtgtctgaagacagcaacagtgtattctaatccataaaataaataaatctttcaaataagatttatttattatgaatacagtatttctcccacatgtgtgcctgcacgccagaactgggcattggatctcattttagatggttgtgagccaccatgtgattgctgggaattgaacttcgggcctctggaggggcatccagtgctcttcactggtgagccatctcgccagcattcctgccccaacaatgattctttggaatcttttttttttttttttttttggtttttcgagacagggtttctctgtatagtcctggctgtcctggaactcactctgtagaccaggctggcctggaactcagaaatccacctgcctctgcctcccgagtgctgggattaaaggcatgtgccaccaccgcccggctgattctatggaatctttttccatgtgtttttagttagagaacaagcacagacgatacatggtttagaaagttactgatcagagagttgcagcgtgtgtgtgtgtgtgtgtgtgtgtgtgtgtgtgtgtgcccttacctagtaccttgtttgttgctgcttacagcaggatagctggcctgtgagatacgaggggtcttcctggctctgcttgatatcttgtctttggggcactggagttacagacatgtgttcctggatttgtataggttcctggattttgaactttggttcttgtgcttgcatacaagtgctttatcctctgagccttgtccctgggccctaaaagctgaacttttaacactcttttgtgggagagggaaacaagagtcactgtggccctggatgtcctggaacttgctatgttggcagtgtccaggccagaggaacggcatccacattggagcttctggaggtcacccgttagcatagctactatgagcataccttggagaagcaaagtcctgggggattgtgcccagggggtccttggttgttgctagggctcctcgtgcttgatgtcattgtgttctctttgtatttagcttgttgtgaccattttgtggaagcttcccactcctctctgggcaatttacctgtagtacatgattcaagtggtgtttttctgggataacatggtttaaaaggattaatgattcaattgaactttctgaaaatagtttaaaacaggagtggctagggcttctaatgaggggtatagagaagataggaataagactaattagcaccatgaccaggctggcctcaaattcagagctctgctttcctctgcctccctgagatgggattaaagacaaggagccctacagcaggtttcatttacatactgactttgtttattaggagggtttctctatgtaacccctgctgtcctggaactccctgcatagaacagacttaccttgaactcaaacatccacctgcttctgcttctgcctcctaagtgctgggattaaagacctgcaccactaccctcctccagtttaacatgattttcaactacatttttttctaggcatgtcttaaaagaactgttcgtaagcatttcaacctatcgtatgcaccccaatgacttaagggagcaagccagaatgctgggggtgtaaggataaaatgctgaccaaaacaggtagcggttcaagctagtgatgtagctcagttggtagagggcttgcctaatatgaggaaagtctcaggtttcattcccagcgctgcatgcaggaattcaaggacttcaaggtcatccttgcccaacctaggtgtcttagttagggttttactgctgtggacagacaccctgaccaaggcaactcttataaggacaacatttaattgggactggcttacagggtcagaaattcagtccattataatcaaggcgggagcatggcagcgtccaggctagcatggtacaggagaagctgagagttctacatcttcatctgtgggcctctaagagaagactaatttctagacagctaggactagggtattaaagcctaggcccacagtggcacacctactccaacaaggccatacctcctaatagtgccactccctggcccaagcatatacaaaccatgaccctaggctatataaccctttatctaaaaaagaaaatggtacaggaaggagtctggggagataagtgggtcacgtgcctgatgtataaaaatagtgacttaagttccaattctcagtatctatgtagaaggctggtgtagcagtataaaatcctgatgctggggaatggagacagagcatccctggggtttgctggctagccagcgtagctgaaaggctaagtctgctgcaggctcagtcagcaaccttgtttcaaataaggtggagagcaatagagtaaagatgctagatactaagccgggcgtggtggtgcacgcctttaatcccagcacttgggaggcagaggcaggcggatttctgagttcgaggccagcctggtctataaagtgagttccaggacagccagggctactcagagaaaccctgtctcgaaaaacaaaacaaaacaaaacaaaaaagatgctagacaaaaaagatgctagatactgattgatctctagacatcatgcacatatgcatgggtaagtgtacacacaaatacctacacacacacacacacacacacacacacacacacggggaaaaaaaggagaaaaaaagcccggcgttgtggcgcacgcctttaatcccagcacttgggaggcagaggcaggcggatttctgagttcgaggccagcctggtctacaaagtgagttccaggacagccaagactatacagagaaaccctgtctcgaaaaaccaaaaacaaaaaaaaaaaaaaaaggagaaaaaaagctcagttggtaaagtgctacttgatccacatgaaaagctaggtagttagcatgcacttatatcatctgctctagtgaagcatgacaggagaactctagggtgtgctggccaggaaatctggttgaatcagtaagttccagtgggagaacaggtttcaggaaacaagctggagaatgatagaggaaggcacccataattgaccttggcctccacctacgcatacccaggaacatgtatgaatgcatgtacctcatccccacaacacacacaaagaaagaggcgttattggtgctcttgagtttggaagtcccagggtaagataagtggctcgttcctttgggtctctaatgaggttctccatgacaggagcacatagccgagcaaaactgctcctctcatccagaaagctatctggataagaatagcaccccacactctcatacactgacactctccagtaacctaaaattctgctgggccttacctcccaaaagttccacagcctcctaatagcactagcaggcaaacaaacctaaccagattgtctggccagcaagcctgagagattctcctgccttgctttcccggagctgagggtccaagcatatcccaaccatacctagctttttatgtgtgcccctgggagacactggctcaaactataatcttggggttccagtctctgccatatcatattctcgctgtcacctacctatatatcccacatgaatatccattactgaagctccaagctctcagctcctctcatggatatttccagcccaggtgatgtctactcaagcatgaattccagcctaaatgttcctggcctaagttctagctgtctgctaggtatcggcttccatctctatctccacctacttctaaatttctcaaaaaataggtccctctgtcttttagatcaatcctctctttttaaaaatccatccatctttccttccttccttccatctaattacatgtatgtgcatgtgtgggcatgcttgtgccatttgtctttgtctgtgtgtctatctatccacctatctatctatctatctatctatctatctatctatctatctatcttttatcctgcccataattccaacacttaggagacggaggaaggaggattgccatgagtttgaggccagcctggattacatagtacattccaggccattctgagctacagtataaaaccctgactcaaaagcaagcaaaggccttctaatccatccatccattgaagtatatatttgttcatgtgtgggccatctgtctatatctatactatatatttattacatgtgtgttagtgtatgggcatccacgtgccatggcacgtgtacaaagatcaaaggacaacttgcagagttgttttggtttaaagccatttgtagagtttctcctcttctgctctgtccatgtacttcagatttcaatcctttcattttcttttgagagcagtggttggccttcgtcctcaactggattagaaggttatttgtgactatgctggcctgacttccccttccccaattttcctctattcctgggtcccacatgtctaattgtaacttcttcacctctacttatgtagatttctctaatactccctcacgcctcataatttcactttcttctttttactctcagccactctggcaaagtttgcagtacctgttgtaaagaccagtggcgctttctaattgttcccttacttcttggctctaatttttattcccaaatggtttaagtgctgtcactgggtcctctactaacctactttgccaaagacccaaaaatagaattcatatgtcagatggtgagaccaaaatggaagtctgtggctctacagactcttggcttagcctcttacttgctggtagataatgaataggagtctaccccaaagctggtagtttgttggcaaagtaaaggcaaacctgcccagatataagggtggacaaagtatacaccgacaccataaaggggcaggagcaagatgagagtaatgcaagctaaaacaaggtgtggcaggacaaatggaggtttctggtttgcttagggaaaatgctgcatgtaatgatagctcaaagcttgaagccaggtcatgtggcccctgcccataatcccagcacttaggaggctgaggaaggaggattgtcctgagtttgaagccagcctggaatacatagcatgtccaggccattttgggctattttctgaaatcctgactcaaaagcaagcaaaacccaaaattgaagcccttgtgaggtaggcaagcatagagagagcttaccaacctgggcctgcagttggcttggcctagacctgcacccttcctttaacaatgtgcctggcaaccgcctggcaacctaagatgcccaccttcatcaagctgcaggtacaccatattccaacaatggaatacatttctcttcttctagcttcaaaaataccccttttctggtcagtttccactcaagtgtgttcccaggcttatgtgagatcgacaggccagaagggaagttatctgaactgttttgggggtacacacatagtaaggtaaactgtcttagagtgaactttagggaaaaactcttttttaccagcttgtacctatgcataattgggtgtgcatcatgggaacagacatgtactgaaagcaaaagcttacataatccaatacgcttgtcaatcaaaacagaactacctgtggtacacatcttagcaaccaaacatcttctgttcttccttcagcccataaaggaagtacccagacaataacctggtaaagaaacaataacagtaaagttaaataaataaggttttatggggttggagagatggcttgatggttaagagcactgactactcttccaggagtcctgagttcaattcccagcaaccacatggtggctcacaaccatctgtaatgggatttgatgccctcttctcatctatcagaagatagctacagtgtgctcatataattaaaataaataagtcttttttaaaaaatgaaataaagagaaaaaaaaaaagaaaggttttatgatccaaaaagccaggtactgaatttgaatgttcgaagttagaatctgggcagtattatgtttctcctgctctctgcctccttgagctctgtgagttcaaggccagcctggtgcacatagtgagttccaggccaccttatgctacaacttttatacaaatgttctcttatacctattaagcttttttccacttagaaattgcaatcttttcctaggtcataatataaactctttgtttgtttgtttgttttttgtttgtttgttttttgttttttgagacagggtttctctgtgtagccctggctgtcctggaactcactctgtagaccaggctggtctcgaactcagaaatccgcctgcctctgcttcccaagtgctgggattaaaggcgtgtgccaccacgcccggctaatataaactcttattcttaccgactatctaataatcaattatgtagctgtatcatacattgtctcatgagacatttgaatacttttcagctttcatagttgctattttggtatttcaagcagaccatttcaaatcacaaagaaatagcagaaacccacaaattgaagtttgttctatatgatcactggcctgaacacctcaaaaaagacttgaaaaactgagagaggcttaggatctgtttgaaataaatagtgacaaagggacagcataactcaaaggaatgctcaactcggaactacaccccaactagaaaataacctttcgctataaggacattttagaaagtataggtgggctgggagtggtggcgcatgcctttaatcccagcacttgggaggcagagacaggcgaatttctgagttcgaggccagcctggtctacagagtgagttccaggaaagccagggctgcagagaaaccttgtcttgaaaaaccaaaaaaaaaaaaaaaaaaaaaaaagtataggtggaaggtaaatatggaatgaacacaccacatagtatgtcaatgttaatttcttttttaaaagaaattatttattttatatgaatacactgtcactgtctttagacacatgagaagagggtatcagatccccttagagatagttatgagccaccatgttcatgggaattgaactcaggacctctgggaaagcaatcagtgctcttaactgctgagccatctctccagcccctatgttaatttcttgattgtaatcattgtcctgtaattacgtaagagaatatccttggtctagggctataactcagtagtagaactcttgcctagcatggaaaagccctaggatccatcgttagcactgcaaaaagaaaacatactgtgtttagggagatggttcagcaggtaaagggcttgctgccaagcctgacgatctgagattgtttctttttctttttcttttttggttttggttttggttttggttttttgagacagggtttctgtgtgtaaccctgtctgtcctggaactcactttgtagaccaggctggcctcgaactcaaaaatccacctgcctctgcctcccaagtgctgggattaaaggcgtgtgccaccaagcccggctgagattatttcttaaaacctatatagtagaaggagaaaccttattcccagtagttgtcctctgggctccatacatgcagtgtgatagtctccattgtgtctctctctatgtgtcctgtgctctcacaatctcttctttctctctgtttctctttgtgtgtgtgtgcgcgcgcacgcgcgtgtgtcttactctcatgctctgtcttgcagtttgtttttttgtgggagtgagtttctttaaaaaaaaaaaaacaaaactcttattgattctttgcaagtttcacatcatgcaccccagtcccattcatcttcctgtctcttcatatctgtcctctgcccttgaacctcctcttagaaaataaaacacacacacacacacacagagagagagagagagagagagagagagagagagagagcatcttgttctggaagctgtacactgtgtcccacagcatacccctctgtccacacatcttcactagctaatgttcactgcaatgagtcattggtctggtttgagatctctggcttctgtgacaccatcagtgttggatccttaccaggactcctctgggttctcctgttgttgccctatgtcatggagatcctgcagctttgaatcagcagcactggccctttgaagtgccccaatagttcacaactgttgtagattttgggctgggccatctcaaatgcctggatctgagccagggtgataactgagctgggcagcccgctgcctctctcttatctgtaccaccagagctaactctggcactgttcttgctaggctaccaaatgccacaataagcagtaggcagggttagttctgctctcctcccttgggactggagccagcaagtgggtgggtcagctctcttcctctcacacccttggggctggttcactcatgacttcgagatcagagacttctccactgtattgtccaggggaggtgtgaggctggctctcccaacagtgagggacaaggccagctcttcatctctcatcatctagaagccagctgtcccatgctcatacccaagggaccacaggaccatccaatctgtgctcccccaaccagggtcagctcttttgttctgcctaggcaaggctcagggcctgctctcctggatgctacaagtggcaaggggcagggccatcttctcttgtttttttgaaacagagtttctctgtgtaaacacccctggctgacctggaactcaatttgtagaacacacacacgggggtggggataaaggaagggagggaatgagaaatgtaagaaatttataaaagaatactgtccttagaaaacacatatccagggtttaggaacaaagggagcactttttttaaaaaaacaacttttctgtgatttttaaatctttcacaaagttgaatatactagccaaaacagcaatttttctccagagactctgaagaaggtaaaacctagggacagcaaactctagaaagaggagcaatcctgagaaagactatttaactgagaaaccacatctgagtggccttggctcctgcttcacagtagggttgatgctattttcccctcctgtgactcacactattattagagctctctcaggattttttctttctttttctcccagatgttgtctttaagccagaatttgttgctgagtctgtggtagagtgtttccctagcatcttcaaggccctgggtcccatcccaagcatctccccagatgccttatatgggcttttccaggcatggtggtttattcctacaatcccagtatttgggaggcgaggcaggaagagtgctatgactgctagacaggcttgggctccattgtgagttccaggacagcatgggctaaagtgtatgatcctctttcaaaacacaatttaggttggtagtggcaatgcacacttttaattctggcactcaaatctctcccaacaagtggatctctgtgcatttgaggcaagcctgttttacaagtgagttccaggacagccaaggctatacagagaaaccctgtcttaaaaccacacacatacacacaaacacacacacacacacacacagagagggggggtatgttggatatcctgtttcatgtttaatgtcaacctgacaccatatagagtcacttgagagtagggattgtgaaatgaagaactgactcaatctatttggtctgtggccatgattgtgaggaattactaattaaagtgggagggaccagcctactttgggcagtaccattcttggacaggtgggacatggggtataaaggaaagctagcattggctagacatggtggcatatgcctttaatcccagcagtcaaatcgcaggggcaggcagatgtctgtgagtttgacactagcctggtctacatatagtgagttgcaggacagcagagatacatagttaaaacctgtctcaaaaaaaaaaaaaaaaaaaaaaaaaagagctgggcgttggtagcacacgcctttaatcccagcacttgggaggcagaggcaggcagatttctgagttcaaggccagcctggtctacagagtgagttccaggacagccagggctacacagagaaaccctgtctcaaaaaaaaaaaacaaaaaaaaaaaaaacaaaaaacaaaaaacaaaaaaaaaagaaagaaagaaaagaaaaagaagaagcaaaaaagaaaaaagaaaaagaaaaaagaaagtaaagaaagctaacattggggctgaagagaaggctgggtggttaaaagtactggctgtacttccagaggacctgggttctaattccagtacatgatagctcatagccacctgtaactccagttgcaagggttcaatatcctcttctggccttgatggatattatatacatgtggtacaaagacatgtaggcagtcaaaacacgcatgcacatttaaaaaattaaaaagtttccaaaaagatagtgtgatagtgttttctaaagcaaacaaatcctaaaacaaaacaaacaacaaccaaaagagagcaagccaatgatcaggttcctacctcgagttctgctctgactcccctccatgatgaattgtggcaacagtggaccacattgtaatcccagcatttgggaagcctaaggcaggactattagcacaaggttgaggccaaccttagctagatgctcaagtccaaaccagcctaaaacagtgaaattttttaaagatgtactttggagatcagaaacactgtttagagggtaaagctgcctgatgccaggcctcacgacttgagtttgggacccaggtggaaggaaagaaccaagttctgcaaactgtcctctgacttccataagcaggccacggtacacacatgtacagatacatacatgtgcacacatagataaacaaacgagggggctggagagatggctcagtgattaaactgactgctcttccagaggtcctgagttcaattcccagcaatctcatgacttttcataaccatctgtaatgggatctgatgccctcttttggtgtatctgaagacagctacagtgtacttgtatatacaataaataaatctttaaaaaataaacacacaaataaatgtataaacaaataaatgtagttacaattatttttacaagtgaaaagcaaacaatgtaatatttaaaatgttcatggttggcctagagagatggctcaggggtaggaacaatgactgttttttcagaggtcctgagttcaattttcaccaaccacatggtggctcacaaccatcttgtaaagtgatcagatgccctcttctgctatgtctgaagacagctacaatgtactcatatacataaaataaatatttcttaagaaagagtccatggttgcacatgtcaataatcccagtatgaagaaaccaaagattaaaggatctcaaattttaggctatcttgaactacataacaagaacacaagtaaccttttctttaagagcaccccacccacaagtcagtcagattactttaataacataccaaccaaggaacaagtcacactttttggtttagagattgagatgagtgttccattggtaatggattttttgagacaatataggcatctcaattggtaccgagaagctagggtatagctcaggggtgcttccggagtcatccccaccagcatgaaaacaaactatgaacactaataacctgacagcttgtattaaactgatgatcagaggggaagcacaaagacaaggggcttcctatgtccactgaaaagtatagaagcaattccattaaggttctcaaagaaatctgcattagtttcctctagtccatctctttagttcatagtttgtttttttagatacattgcagtctgccttcatgaatccatctgcctctgagataaaatagtcctggaaatccctagtcccgaggcttgtcagctttatgcaactggtaatatcaccttaccctgaaagggctatctctgccacagtcctctagcaggtctctgagactgctctgacatcccttctagaagcccaggatgagccaaacttaatatagtcaggtgtggtggtgcatagctataatcccagcactcagaggctgatgcaggacgatttcaagtttgagtataagccagccagatcctatctaaaacaaatgaactaatggaagagctatgcaataagcaaaaagtactatgcaatgataaagttctgcatgtgcacagtctagtgtagtaccataagcaacacttgaaatgcttctaatagggactttttcctggagtctcttgctggcaatggagagtcccccttcctactgacaccctttttataagctgtgccccacagttctgatgacttgtctcacagccatgtctacatatgtgcgctacctggctgttttcatctctgtacaattgttgtaagtactgcaggaaaggtggagagaaacagagcttttctatccccagttctggccaagctctggcaataatccatttccctttaccaattctcattttcttttgatatggatggatgcatgctacagactcccattcccatcttcttgtcactgaggattttatttaatttaaatatttaattcatggggctgaagagatggcttagtagttaagaatatttgctgtccttatagaggttccagaatttgttcctagcagctacatcatggctcacaaccatccatagatatgtatgtggtaaacacacatacatgcaggcaaaacactcatatacataaataaatgaattcatctaaatgaaatgcatttattattatgactgtatatgtgtatgtgtatttatatgtgagagatcgatgtgtgtgtgagagagagagaaagaaggagggagggagagagagagggagagagggagagagagagagagagagagagagagaagtgtgcatgtgcatgtgtactgtactggctggttttgtgtgtcaacttgacacaaggtagagttatcacagagaaaggagcctcccttagggaaatgcctccattagatccaactgtaaggcattttctcaattagtgatcaaggggggaagggccccttgtgggtggtgccatctctgggctgatagtcctgggttctataagagaacaggctgagtaagccagtggaagcaagacagtaagtaacatccctccatggcctctgcatcaattcctgcttcctgacctgcttgaattccagtcgtgacttccttggtgatgaacagcaatgtgaaagtgtaagctgaataaaccctttcctccccaacttgcatcttggtcatgatgttttgtgcaggaatagaaaccctgactaagacctgtgccatgacagctatgtggaggtcagagaacaactttcaggggctggttctctcctttcactgtggattctgggcgttggacgcaggtcattatgcttgtatggcaagcacattcaccaactgctatcaccatggctctacattttaaatgagttttaattaattcagacctacgtttatgaaattgtcacctgcagttggtgtcttctatactggatggtgtggctctatctcatttgcagcagggatctttaggcagttgtgagggaaacaatagtgagcacctgtgaagtgaccaaatcattatggcttgttcattaataatggccaaatgaaggaattctctgctgaggaacagagccggagatggtgccacctgttactatcgagcctgtgacaaccacgtggttaagagcatattttgaaagaacaggttatgaccagagaggcctcatacacatgtccaggatgtgaaaatccgtccttgtcatatacatcctagccacagtttgcccctttgtatttttcagacactaaagggattgtaaatatagccagaaaatctttagaggtggacagttttaaaagtcaccttggaagccatttacatgggaatttgagtttggcactgcctggcaggaaaagatataatttcattacaaaaacactttacctatttaaaagtaacctactgtgagtcaagcttcttactcacttcagtacatttgatggggagcttgagagatggctcagtggttaagagcacagcctgttctttcagaggacctggggtcaattgccagcccccacatgctggctcacaattgcctatacctccagttccaggtaatctgaagtccttttctggcttctgtgggtatcaggtgcctacatggtacatagacatacatgtaaagtaaaacacaaaataataaaaaccaaacgatataaataattgaaattataaattaataataaataaaattataatgagtaaataatacaatcattttaaaataaaaacacaaactaattttttttctgagacagggtttctctgtgtacttgaactcactctgtagaccaggctgtcctcgaactcagaaatccgcctgcctctgcctcccaagtgctgggattaaaggcgtgcaccaccaatgcccggctacaaactaattttttaagaattattttacttatatgactacaccatagctgtcttcttcagacacaccagaaaagggcatcagatcccattccagatagttgtgagccaccatgtggtttctgggaattgaactcatgacctctggaagagcaaccagttctcttaactgctcagccatctctcaagcccaaacattagctaattttgttacacttagtgcatgtgggtgtacttgtgccactgtacatgtgtggagatcagagaacaattcagaggaattggttctctccttccactgcatggatctggagggtggaactcaggttaccaggcttggtgggaaattcccttaccatatgagccatcttcctagccattctttgtcttctattttatttttatttatttttctttatgtttgtatctcccaccctgtacaaaaatctatttaaaatggataaaagaccttaatataaaaccctaaacactgaaactactcaaggaaaacacttttaagatatgggaaagaattttcaggaaatgttacaataacccagtaagtaatgccaaacaaggctgggcagtggtggtgcacgcctttaatctcagcacttgggaacttaggaagcagaggcaggcggatttctgagttccaggacagccagggctacagagaaaccctgtctcgaaaaaaaaaacaaaaacaaaaacaaaacaaaaaataatgccaaataatccaaaacctaccgcattgcaaggaaaacactgaacatagaggagacatcctacaaaatgggcgaaaatctttgccagctacatgttagaggtataatatctaaaacataggaagaatgccttttcattgtcttcacactctttgtctacactgtgaatctaaactataaaacgtttgcaatatgctattgcatacattaagtatatatgatgttctcaggcctccaatatatacagcagagactacctggcctggcctcagtgagagaagaagcacctaatctttgagagacatgaggccccaagggagtggggaggacttgcaggagtgggagggacaacctcttagatacagggggggaggaggaatgggatgaggaactgtgggagggtggactgggagtggggtaatgactgggctgtaaaaataataataataataataataataatgataatatatgatatagggccagatatggtggttcataccatcaatcccagcacttgggaggcagaggtatgcagatctctgagtttgagcccagcctggtctacagagcaagttctaggacaccagggttacattgagaaatcttgcctcaaaaaaacaaaaagaagatcaagacatgatgtagggctgaagagatgactcaaaggctgtgagcacaaactactgctgaagaagatccaagtttagctcccagggatcacatcggacaacacagctgcctataatcccagttcacaggcatctgacacctctgatttaattacataaacaactaaaaataaaaaaccatctttctttaaaaattatttatgagtacactgtagtgccttcagacacaccagaagagggcattggatcccattacagatggttgtgagccaccatgtggttgctgggaattgaactcaggacctctggaagaacagtcagtgctcttaaccactgagccatctctccagccctgtttggttggtttttgaaacaaggtttttctgtgtagccctggctgtcctagaacttgctctctagaccaggtgaccctggaactcagagatctacctgcctctgcctcctgagtgctaggattaaaggtgtgcaccaccactgccaggctactatgaaaaataaaatggtacatgagccaggtttggtagctcacacctgcactcctagcactcagaaggaggattgttgcaagtctgaggcgagcttaggttggttacacagtaaatcctgggctacatagcaaaagcttgtctcaaaaggcatgttatcatagctaatgtttcttctattgtagtgataaagttggaacctaggaccttgtaaatgctcagtactgacctaccccttgagctcctagttaattatgcctactgtcctgctctattgtttttgcttgtgatgcgccaacatttgggtcatgagatgaagaagcgagcctttggtaatagtaataatctaggtgaactgggaagatgagcggagcatgaggtaccataactcaagttcatcctagcctacaattttaaaaatttatatgtttgaaaatgtaaataggggttttgcctgcatgtatgtctgtgttctatatgtgtgaagtgttcttggagcgcagaagagaggtttggattccatggaacttaagttacagatgatgatatagatattgcgaatcaaacctgtagcccctgtaagagtgtttttaaccactgagcaatctcgtcagccccatagtttgtactcttacttaacattgcacaatgtatgcttgtggccagacatgtgagaaaatccccacatacctagaaagtctgcaaaaggtaacattgggatgccctgtaactggaaaaagcaactgacctcacagatctcagagggtagagagatcagtaactacaggttagagatagcatcagagcctacaggttgagggctctgtcttacaagactctttcccacttcaggtgcccattacatgttccaggctgtgatttgtacttctgaccaaccagcaattaaacagaggttctcatgataccctcctcagattcagttcttattagaacagttgtagtcccgggaaacccttaatgcttagcagtgtactctaaagactatttaaaaagatgcagataaacacccgcgtggatgagaagtagggtggggtatgggtggggtcatggagtgctcatgctgtctctcataacactattcccctaggatgaccatgtgttcagcatcccagaaaacgcatgacatcttattgttcaagagtctttagttttatttttgagattacaatataattacattgctccctccaaaccttcccatacacacctcacaactctccttcaaattcatgaccttgttttcactaattgttattgattgcttgtgtgtgtgtgtagaaaacatatatatatcctcctaaatctgtataacgttacttgcatatgttttttcagggctgacctttttttttttttttaaagatttatttatttatttatttatttatttatttatttattatatgtaagtacactgtagctgtcttcagatgcaccagaagagggcatcagatctcattacagatggttgtgagccaccatgtggttgctgggatttgaacttcggaccttcagaagagcagtcgggtgctcttacccactgagccatctcaccagcccccagggctgaccttttggcactacacaaagaactggtgtggtcttccctcaccacctttcctgctcccagttttcctctgtttcctatactcctttctgtagggctgaagcctcatgggattttccccatccactttggcatgtctcttggtgttgtccatgtgtatgtagctctagcatgggcagtcatgctgctgagaatttatggagcttgcttttggcattaactaggagacataacctcatagcaatctccttgatcagttcacgggtcttttatggagctggattcccccgaatcccagatgtcatatgtgcaattcaaattccagtcctctagtcacttaatcttcctgtgacaagcccaaggttacctcagacctatttgtaagtcatctattaacagcctctactggaatcaaaggctgctggtgatgtagctcagtggcagagtgcttgtctagaatgtcctgagcctgatccccagcatcatagacaaaagaaaacgaacttccagcctttggcagagagccccacttgccatcccctcctattttaatttgaagatgactaatctcagcctatctagaagcagtaagtatttcttctttgggaatgcacctcttactatggaacactgtgaagactaaccattacaacaatatttctggtacttactagaacacatggaatttaatcacctggtaacatcagactaacccaactgaaagggaaatctgcaggcagttagccagaaatacctaggtcatgacaggctgagtctgaagaactcttgaatggcaacaaagaataagaaaataagtaaagataaaccaggcctggtggattcttgcactgtgtaggtagaggcagcggcaggtgggtctctctgaatccaaggccagcatgttatacacaggtaattctaagccagtcagagatacatagtgaggccatgtctccaaaacaagcaaacaaacaaaaacagaaaaaaggaaagataacatgtgtccttggattggaccctagtccagaaacacagggcaaaaatggatcttctggtcaaagactcctcacctctgggtctggataaaaagagggtaggaagcagttaagatatgtttggagtgcaatttatgtagttcatccactgagcccatctgagaattagtagccaggcatggtgtcacttgcctgtgattaaggctcttggcagatgaaggcaggatcaggagttaaaggtcatccttagccacaaaaagagttccaggtgagctgagttgtctgacaccctgtctctaacacacctcctctaaacaagtacaggtagtgagggtggaatgaaatcaaattactggagaaacttatattcggaatataagagagggagctgatcaagggcttttaaaggattgcagaaaggtgctgctgcccaaaggatagctatgcagtgcccactaagtccccgctaaatacttagattcttcttgttcaatttctacgtcaagtttctctgctcattatgaaaagtgatgcaatactttaaatgagtacctctagtaaatcactggacttcacagatagctcaagcaagctggacatttcaactagaaaatcagttagttctattagttaagattttccatagaaacagccagtctgtctacatatatctctccagatatttatgtggagagagaggaggtaaggggtagagattttttttttaatttggcttacatgattgtgaaggccctgttcaatcccaatttgatagaagtaattgcagtaggttggagactcgggggaaagctgacattctaattacaaggcagtctgcaggaagaataccttctcactcaagggaggtcgatctttgctctctcatggccatcagctgaggagatgtagactaatgagggtcacttaaaaaattccaacattatgagttagaatccttgtcgagcaagcataaggaccagagcttagattcacgtgatctcctgtttgtaactggaaggcttgtggacgcagggagaaggggaagacagtagatgggccagcatggaactgggcaggactaggtggagacagaagaattatgcggctgtccaggtgccagactgctccatgatcagtaagagattctgtcttaaacaaggaataaagtagagaatgacagagccttctctagcccccatgctcacaggcacacatattgaatatgtacagatacatcacacacacacacacacacacacacacacacacacacacacacacacacgttcccaagcgcacacacagaactaaaaactttttttttaaaaaaaatcaatgttaagaataagtgttttgtgtaatatttcttgtggaaatatatacgtatatacatcttttctttttcttttttgagatagagtcttctgtagcccagcctgccctcaaatgtgctgtcaccaagaccggcctctatcctcttgcttcagcctcctaagtgctgggattagaagtgtgagctatcacagccaactccagaaatttgaaggactattttggaatccagcatggctttggtagggacagaatgacaaggttcctgtgcctgggacagagcaagctggagtaggcctccacggatgtcaatggctgttatgggcataaggcttgtttgtataataatgtaaatattttcacatgttcctctgaagaatgtcctccctgttaatatttagtcagacagcattagttcaagaggtgaaggtgtgactaatgtctcagcaaaatggtacatcctggggccttcaggacagcctttaagactgtggaaaagaactctaaaaaatgagtttgaaaatatataattcctcaactatgcgaaaaataaagatgaaatatgaattgtataaagagattcacagatctaaaggaacagaggcagctccactatgagtcagattgtcagaaagatacaaagacaggcagatacaaaggcaggcaggcagattctgggttcaaggtcagcctgaaaatttagggccaggcatgatcggaatggtaattccagggtggggtcccacccagctatcttattatctatgtttatgcttgcttgcagtcccttcccaagagacaaggggtaaggtaatcagctaatgctgattcatagggtggtcacaagtgaaccaggaataaatcataaaacatgggcttttggtctgcaggagatgagctagcaaaaggcaatagcagttctttttagaatttttctctagtgagaactcagctgtctggagatctctggagagcgaacacagctcttcaatttttttttctaacagactttcttgttttagtcacaaaatccatggagagagcatagctcttttagaaattttcatagtgttttaagaactttttctaataggtcagaaatcccaagaattacttagagagtggatatagctcttttagaaggctctctagctgctatccagagaaggctgtctgaaggatttttagaattctaaatgtctgaaggcacttttagaatttttttctggctttctgattttgatcggaaaacccaagaattattattattattattattattattattatttggtttttcgagacagggtttctctgtgtagccctggctgtcctggaactctctttgtagaccaggctggcctcgaactcagaaatctgcctgtctctgcctccaagaattatttttagaatttttttctaataggatttctgatttggtcagacaatccaagattttttttatagtagcttttctgactttggtctaaaaacacatgggctctccacagagcttttagaatatttactaggagagagagctatctgtcttgaacagaaaactagctgtctcaaccaaaaagtttttagaatactaggaaaaagctgtctagagcagagcagaacacacacgcgtgcgcgcgcgcgcgcgcgcacacacacacacacacacgcacacacacaaacacacacagagagagagagagagagagagagagagagagagagagaacagtagaggaaagtcatctcaacagaacatagatccaagttggggaggaaagggtttattcagcttacacttccactttgctgttcagcctgctctctctctctctctctctctctctctctctctctcactctctctctctctctctggtttttcgagacagggtttctctgtgtagccctggccgtcctggaactcactctgtagaccaggctggcctcgaactcagaaatccacctgcctctgcctcctgggattaaaggcgtgcactaccactgcctggctagcctgctctctcttatagaaccaagactaccagcccagagatggcatcagccacaaggggacctcccctcttgatcactaattgagaaaatgccttgcagctggatttcgtggaggcacttccccaactgaagcacctttctctgtgataactccagcctgtgtcaagttgacacaaaactagccagtacaataactattcaaacaaaggcagaagttgaggtggtatttttttcttctgcagtgccttagagtgactgccaaatttggcacctgttcggcatgtgttaggaatggactccagatccaaggtagagaaattttgggatccatttgactgtatatgataacattttttttcagtaatatcatgtaagaattagtaatagtcactttcccgaactcatattaaattggaaaacaaaactctaaatgtaatgtctgatctgaataaagtgctttgtagatcagcttgtttacttttcaaaaaaccataacttctttcatcttgtactgtgtggggtgtttcccaccatacagtgaggcaagaaggttgcaaattccaggccaactgagactagaaagcaagactctcactcaaaaggaacaaaactccatgatccattgttaaagtctaagaagatgagggcagtgctggcaaaagcctttaatcccatcacccagcaggaagatctttgtgagttcaaagccagtccggtctagggagagagtttcaggacagccagagctacacagagagaccctgtctcagaaaacaaccaaaagcaaacgaaaccaataaaacaaacaaaaaaaaccccacatctaccatcaaatttctcatattagtatccttaataaaagcgtggccactgactatagtcaaacatggtaatgggtgctgggtagatacaaatggagatattgacagtagcattaggggcaagcaactgctggctgcttttgaaaatagaggacgattttgttttctgatttcacattggatagtcagatgtctataatcccagtacttgggagatggagacaagaggaacaggggttccaggccatactcagcaacaaagtaagtttgtggccagcttgggctatagaaggacctgtcttaaaaaacagacctgtcttaaaaaatatctaataggtaaacaaaatataaaacaaattccatgcaggaaattgtggagaaaaaaataaatatgaataacagccacagttcccatacattgtgtacttttatattgtgtcccatatgtatgctcgctcaaatgtatgtgtgcaatcctttaattcccccatattcccatcaagtacggttaatatgcttactttatctatttatttgtttattcattctttttttgttgttgttgtataagattgaacccagaagccgggcgcggtggcacacgcctttaatcccagcactcgggaggcagaggcagccggatttctgagttcaaggccagcctggtctacaaagtgagttccaggacagccagggctatacagagaaaccctgtctcaaaaaaaaaccaaaaaaaaaaaaaaaaaagattgaacccagagcctcttagagcccaaatgtactactgctctgctctcttcctggctcttttattttttcaaacactagtcagtcagtttgttcgttcgttggttagttagttagttagttgtttttcagccagggtctcactttgtaatgcaggctcgtctggaattcacagttgtaattctcctacctctgtagtgctgggattacacatatgtgtcgccacacctgactaaaatcaacatgtaagaaatggcatcttatttggtaatatatgaatctctatcagcatttcttttgtgtgtgttgcagtcatgtgcaagatgtctttctccatccctattccaccttaacaatttttattttgaagcaagatcttaattgtctgggtaggtcgaatatgtatgtgattctcctttcttggtagctgggcataaaagccttttttttttttttaaaccatacttggcttaaaatgctcattttatgtaaaggcaaaaagcattttagggtctatttctcctaaggttactaagtagtttatttttccttttggattggtactccactttgtagaccagactggccttgaactcagaaatccgcctgcctctgcctcctaaatgctgggattaaaggcgtgcgccaccaccgcccggctggatctcaaatcttatgactaagtaaaaatttgtgaaagaactgggcctaaatcttgaggaatcacatcatgatttagagctgtttagactcatgaggagggagaaaaatgcggagtgattatctgggaatcctctgggagacgacagagggcctgggggctgcggtatggccagtaccattttcttcagaaagaaaattatcaggcccacctagtcagataagagttccggaactgcctttggtggcgcgcgcgcgggagaacgcccagcggagcctccggggacggagcctgggcgggccgagagggcgggccgaggggcggagcctggccggcagcgtttctgagccattgctgaggcggcgagggagagcgttgggcttacctcactgctttccggagcggtagcacctcctccgccggcttcctcctcagaccgctttttgccgcgagccgaccggtcccgtcatgccgacccgcagtcccagcgtcgtggtgagccaaggggactccagcagagccccacagccgggccccatgcgcccggtggcacagtgacgcaggccggagccctgaggctcccgaggcccgctctgggcgctggggcggccgggactctttgatggcgggggcggtcagggattcctggagtctggctagatgccccatgagggcggcgggcaggacgggatggcggggttcgggggtggggatgcccctccagtgagccccgacagagagagagggcaggctgcgtgtggaccaggaaggtggcaatggcgttggacttgacatgtgcggccggcggacgcgcgcggtggcaagcggcggagggcggcttcaggaaggatcaggcgcggggagggcgggggagctctcctgggagaggcccagctctacaagtttggggtttggcggccagggaacacctctagaaggagcttcggttcccaagacgaccgcatgagagggcatgttcaggcctggactttgcccctaattctgcagatgccataattcatatttgtgggaatgcgcaatcactccgttgaatcagcgctgcggcccaggcagtgaaaatcacgcctattttccacctgaagagtggaaaggcggctcgttttttgttttgttttgttttgtttttttacccccccatggcccagaataatgggctttggcttcagatacacttgacttgggagcccatgcccttggatgctgtgggaatttaaaaaaaaaaaaaagtatggatttggttgttacgttggatgacttttttccacactcatcttcagatatcctgccttttctcccattggctcaattttttctaacctgccaagctctgtctcccctatcaatcccaacgccataaccttgctgatcatgcttgctagaacatcccatagctcctgcttctgattaacgactttagcctgctctattcttattcttgcctctggtactccttaaatgtcatattatgctttatatactacagatttagcaggtatctggttacttgttggttgactttcccactcacacgtactttatcttgatgttttcaggcagggtcttactatgtagctctgtctggtctgtaattggtaatgtagaccatcaagctggccatgaacttgtgacagtcatcctgactcttgcctcccaaatgttgcatcactgagtcttgctggttttttaaaaattcattttagggaatgaacccttgttctactgggtaagcaagctctctactctactgggccaaaagccaggcccctaaacaagcctcagctttaggtatagcacaatgtctggtttgtggcaagttttcactaatagtttgttgggtgaattaataaccatttgagcccttaaaaaggtgttctctcatagtgtattagatattgtggcttaaggcaaaaccactgtgttcttaatgacccagaatcctgcttgcttagaatatgttctatgtggccttcagtatcttcacctagactgaagcttccttttcagacatttcttcctgtgcaaccattgccctaagtagaccaggccttgaactttcagccatcttgcttctacctcagtgtgggaattacaagcaagcatatgctatcaccaggttgtacatttttcttacacctgagatgctggctgctggtattgttaaaaggactgtaagataataaacaacacttatatagtccctgagtgggaatagcataatagccatcattttgtttacatatatctatccttattagttttcaaaataatcctgtaacaaagggcatgttcacattatcagacacaagttattaagagggtagagagctcccctcaattatgtactaaaccctagttttgatcaccagcaccagaagcaaggatacattttagaaaatggagttctgtctcaattcttggtctgtgtctgaggtctatgcaaataaatactatggtaggattcagtagataatgtagtaggtgctacttttattcggatatggctgcttttaagcttggagatatggtacttgttcagtgtagagttaattagttctttgtgctagaagtggctattcttagttttgtttgaacattaagaaattcacagtatttttagtttgtaaattcctgttcctttttttttttttttttgcttccttcccctaaattgtctgcatgctaggaataacaaacacttaaaaagtgcttactacatgctgcttgctcttctaagcccgttagcagatttgacttcttttatttctattttttttcctgtatatggctgctttgcctatatgtatgcatgtatgccatgtgcttgctttggagtccaaaagagctgccataggggttatgctcatggattggcaggatcaatatagtaaaaatggctatcttgccaaaagcaatctacagattcaatgcaatccccatcaaaattccaactcaattcttcaacgaattagaaagggcaatcggcagattcatctggaataacaaaaaaactaggatagcaaaaacctaggtcccctgaagaacaatacgtactctgagccatccttcaacccctacttgactccatcttttaaaaaaattacacagacaaggtaaataacttgcccatatcagtcagtgctaccacatttgaacctgttaatctggccccagattctacccttaaccagtagacttgttaggagctacagtgaatgtttatgaaatacttgttctgtcttcagcaatgacaaatgttttgtggactttacctaataccaataagttacataataagtgccccttgtgtagatgaacatgactggggtgatacaaggtagaggaagtaaatataagctacattactttcatgaaatgggcccctagatatgcttgagagctacaaaaacgtgctgcttgtaactatcagtctagaaaaggcttctggcttcttacaaactaatgtgaaacatcagatatgttttatatggtatacacttgaacttcaaaatagcccagatgaaagtataatatactaactgaacttaaaccttgttaatgaatttttcaaaatttatagtgtcttgagacaaagacacactctgtaaattaatgtggcctgctggccttaaactaacagtccttctgccttagtcttccatgtgctagagttacaatcatgagccaccacccttggctcagatgatttttttgagatacatactctgtagttttaggctggtctcctaactcactttgtgagaataagagacacattctaccatgcttggtatgctaatgaaagtgaatctgtgttttggtgatctaacttgaggtcttgtgctaataagcatgtttcaccattaagctatacctttatctatctgctaatttttttcagtttttaaagatttcttgttatgtgtatgagtgttttgcctgcattatatgtgtgtgtgtaccattaggatgtctgtggatgtcagaagaaggcatttcatctcctggaactggagttacagactattgtgagcctccacgtgggtttggggaactaaatctagatcccctgcaagagcaagtacttttataaaattaattctttttaattcactttatgtcctgatcaccctccctcctctctccccagtcctaccctaccatccttacaaatccctccccctccctcagagaaggggagcccccactttgctcataccccactctgggcatctagtcccagcaggtctcccacggaggcctaaccaggcagtctaagtactcctaaccattgagccgtctttctagcccatggttttttttttctctcagaattggttaaatattgtagtttttgcctaacactattttattattatcaatggtgtctaaaataacatccatttataaataagaccaaaatgaattattttgatcaccaaaaaatgggaatagtccctcttagaggtttctttatgtaaattttatactcttgttacctctgttatatgtctatcttatttggataaaaataatctggattattgtagcaggtgggaaaaagacttaattatatcagaaaaaagatgccttacagttttattattgttttgggtggggttctttttgtgagggattagtttactttatttagtctgggatatattttctttatataggccaggcttgtctcagactgggaatccgttttagtctcttaagtgttgggattatgagcatagactgctatgcctagtcttgtagtttttttttttttttactttgtaaattttagatgaaagaaaaaacagctaacttattttattaatgactatcatgaattgaattttcacttttttatttttgtgcaattggtagttcagagacctttacagtttttttttaaatttcttttccttttttttctttttggtttttcaagacagggtttctctgtatagccctggcagtccttgaactcactctgtagaccaggctggcctcgaactcagaaatctgcctgcctctgccttccaagtgctaggattcaaggtatgctatgagtcacaacacttgacaaattaaatggaattatatcattttccccttcccttttctccctccagttcttcccatttgcccaccctagaatctttttctttgattatcattgttacctacacatgtgtatgtatgtatgtatgtatgtatgtatgtatgtgcacatatacttgtttgtgtgtaaatgggttcaaggttgctcactccgcaatggatagccaaaaagggagctcttcctgggcgtgactaattcttctcacagttgtcattggttgcctgtagttctttgtctaggggtgggaccaagagaaatttctcaaacctggaatcctcctgccttagtctcctgactaacttgccttagttgattctgtaattctctgatgtagatccttaggattaaattcagattaagtttggcagcaagttcttttatccaccctaccgtctcagcagcctgagatgggatctggctgtgttgcccaggctagccctgccttaattttccaggtacttaggactacaggtgtatcaccctattcccagtggaatgtgttttattccataattaattagattaaacaatggtccatgtcatttttctcccctatagtaaaggggtattgaaattgtgtttgttctgtctttctgtaattttatgttaggtggatttactaacattgatagatcacatagaagtgttaattactaccagtaatagtaatattgagatacacttgttattttcctgttgaggactaccaaaataactaccatttaaataatttgttactagtaggaattcagacacttcaaattgctttgaaaactactttcagttttttcttgctgtttagtgtcaaaatatctatgattctactatgcatattagtaaagggaaagattttttttttttttttttttttggtttttcaagaccgggtttctctttatagccctggctgtcctggaactcactctgtagaccaggctggcctcgaactcagaaatccacctgcctctacttcccgagtcctgggattaaaggcgtgtgctaccaccgcccggcaagatttttttttttaattcatgtccttacagatatggtagttacaggcctacttgcctagagtggttataacttattcctgggctgagtagtctactaccttattttaatttttcttatagctttaacccttggaaaggaaacaaatactctatgtatgttatttgtaggactgataaaaaaaaagaaaatgaacatagtaccattttaagttgttttcatatttaggagtatctatcaataaattataatttttgtttaatcatatccagacataatataaattatctcaaggatagcttatcatctgctttttttgagattttttttaaaaagttttatttgtttttgaaaaattttaatatatttgaattaagctagtgtctcactgtgtagccaagaactagtagttttctgtctcagacttctaaatgctgagtttataggtatgtgccaccatgcccagcacaaatccctattataaaatgtgcacatttgtaataatggcaatcacatgaaagacaatccttgtgatttacacataaaatttcctgttacacaggtacattatcagaaataatatgaaaaaggaaatgaacctaagctaatacgacctttggaatgtcaggttattgtctacaatttggattgtttaagtctctttatagtaaaatataacattgttcatgagcccaaacaagactccattaaatggaagtgagtcctaaaatgactacttgggagacagggggagaaggttcagctacatagtgagttcaaagccagcctgagctcatgagactgtctcagagaagaaaactattgtgaattaagagttgtatagtaccaggcagtggtggtgcatgcctttgaacccagcacttgggaggcagaggcaggcagatttctgagttcgaggccagcccggtctacagagtgagttctaggacagccagggctatacagagaaaccctgtctcgaaaaaccctccaaaacaaaacaaaaaatccccaacaaggacaggaagagttccaagccagcccgggtcacatagtgttgagacaggaaagggtgtgtgtgtgagagagaataatagatagtagaaaaattgttttgaattttatgactagtaatcagcatgttcaaagttttagaatggacagaaatgtgaccgtcacatctgtgcacctgtgttcacacatgcatgaccacataaatacacacacacacacacacacacacacacacacaatctcaagtgaagagttgtaagactttttgcattttggagaagaattatgttgatatggctttaataaactgggtatgatggttcatacccataaacccatcatatgagaagccgaggcagaaagattgccccgggtttgaggatagcttagactatgtcgtgagattaagtttatggtgtactgcagagccaaggcaatctgaaatcagaaacaaattttttaatgttaaaataactataagcatttcagaggaacaaaacaaaaattctcagatatgaatttgttttaattagaaatcaagacttttgcattggtgtgttgatggaaatagaattcctatttttgagtaattcctgatgtttgtattcttagactacttgggtgcacatctgtaatcccagcactcagaggcagagggaggaagatcatagcaagtttgaggccaacctaatctatatagctagttccagtacagctagagttacatagtaagaccctgtctcaaacacacataaaaagactgggatgaacttggcagagttcacattggatttgtctttaattgaaacagtctttgaagttcttaggtaggttacctgtagaacctgtaaccaggcattgagctattttagtaggtgcagtagtctgatgaaacctgggtgtgataggcttaaggcagaaacagagtgagtgggcagagggtatgagaatgcctcaggaaagtcattgtggtattctaattttgattctaaggtactttgaaataatccagctttatttttgtcaggtagtacataagttctcatgagcctggcctgaatatttattgttgttatcttataaaattgagcagtctgtcatctttccccaaaacatgaactaaaatttgctttatagaacttacaaaaatgctttttttgtaaaatactctttgaatattcctttgtatgatacaaatgcccaatttctatttttgttactaaatgtcctaatataaatattaagtgaatgttaagcaggtttttttagctctctaattttttaaagaaattgccataatgtttcacaaatttttctgattatgaaaaaaaatacatgtgtatttaagaataaatcagtattctgcatgctgcaggttcttgtgaacagacctaaaaataaataaaattctatcaaacattgagctcaaaatagaccttttgtgactaaacagagagacagacagactatacaacttttaatttttttctctgggagaaacctcaaaatatatctgaattctgagctgggtgttgacagtcccagtacttggaaagtagaagaagggttgtgagtttgaaaccagcatgagctatgcaatgcaattccatctcaaaaacaatggcaagtgaattctgcaaagaacgtaaacttatgtaattttaatttttttcaaagtcaaaccacttgtgacgaaagcacctaataaaacgttaactgaaaggaagaactctgtatgaattcacagatatgatgaaatttagttatgatttggccaatattccttgaaaactgccagagcgtagacaaccaggtcttgtagtctattcggtttagaggattttttgggatgggggcaggagctctctatgtaggtcaccttggcctttaactcgtgattatccctgcctttgtacccgagtgctggcattagagatgtgtgacaccatgtgcagcttgatgctttagttcttacaacaccgtgccagggactgctgcttcttagatggggcttaaaagttgggaatgtcatgtaagattgagtagtctaattcttcctggcttatttctctcaataagtttttttaaaaagatttttatttattattatagataagtacactgttggctgtcttcagacacaccagaagggggcatcagatctcattccagatgattgtgagccaccgtgaggttgctgggatttgaactcaggaccttcggaagagcagtcagtgttcttacccgctgagccatctctccagcccctctcattaagttttgattaatagattaacttatgatcttttaagcttttcttgtagtttagtttttgttttgcttttagtgtaaagagggctggagatgagcttggttgctggagtgcttgcccggtatgcatgaaaccctgggtttgacacctagcatcgcataaactgggtgtgatatactcatgctcataatctaaaagaaggagaagcttcagaagttgaaggtcaactgcatagtgagttttaggccagtttaggatccatgacacccccccgccccccatatctcactataattcactgtcaaatggcttttatgatttggagtttggggatacttttaaagacagggtcttggtagctcctagatggcttgggattcacttagtaacccttgctggcctaaaattcaggaacttctacctcatcttcccaagtactgggttagtagggatgtccagcatatttagcttgctttaatgattttgctgtacttttttctgtgtgtacaggtgcatgtatatttataaaactaacataatatattttacccccaaagtaccataaccctaattaatgctattaaatgttttgtatgctgggctctgggcatactaatataaccaatattatacaatgcaaaacaattttggaatatcttctgtaaaattatcttattagtaagttgtaaccatctcagacttctaagtttgagtttgtaaaggatcagttttttttggtgacctacacacacacacacacacacacacacacacacacacacacacacacacacaggggggtggattctgagaatttagagaatttagatggttaataccagtttttatttttattctgtgtgatatttatttattaagatttatttatttattacatgtaggtacactgtatctgtcttcagacacaccagaagagggcatcagatctcgttacagatggttgtgagtcaccatgtggttgctgggatttgaactcaggacctctggaagaacagtcagtgctcttaaccgttgagccatctcaccagccccgtgatattttatttaacttactagaatatactgtgttaaaacatattttaggggattggggagatggcccattctgtaaagtgtctgccatgtcatcttcaggacctgcgtttgtaaccccagcatggagaagacagagacagggagacccctgggcttcctggcaagctagactagcaaatttggttaactaggttcaatgagagactcagtctcaaaacataagaagtgaattttttagacccaatttcaatctctgaactccatacgtatgcacatgtacctgcatataaatatatatacacacccataaacacatgcacacacaaaaaatggttcaaaagttcttaaaatgtataagagtagaaagtgtagagccgggagtggtggcgcacgcctttaatcccagcacttgggagcagaggcaggtggatttctgagttcgaggccagcctggtctacagagtgagttccaggacagccagagctatacagagaaatcctgcctcaaaaaaccaaaaataaagtgtatatactaatctttcatgcctaaaatatttatttttgccacatttttcatacctctttaatatttttctttttctctttgtgcttcaaaggaaattttgtgtcatgttttacttttcattcttgactctattcagcagtaagacgcagcatggctttcttagagaagtataatctattacaaaacggtaacatttaactgctctacataccctcttgtagctaaattcctctgttaaactaagacttattatctaaacgtaattaaatgttgatatcttataatgctccactttgaaacagctgtctttcttttgcagattagcgatgatgaaccaggttatgacctagatttgttttgtatacctaatcattatgccgaggatttggaaaaagtgtttattcctcatggactgattatggacaggttagtaagacctcgattgaagttatttttagagggtgtgtgtgtggtgtgtgtgtgtgtgtgtgtgtgtgtgtgtgtgtgtgtgtgtgtgtgtgtgtaagagagagaggagaggcatgtgtgatatatatgtgaagtgtattgcatgtacatggaatccagagaaggacattaggtgtcctactctgttgctctcttattcccttgaatcagtgtctcttgctgaacctggggcatacatactgatttggctaggctgcctggctagcaagacccagggatctgcttgtctctgccccccagtgctgacgttacaagcaggtgcaaccacatctggtttttatatgggtactgggggatctgaacttagggcctgatgcgtgcccaagtgctctcacccgccaagccacctctccagccaaagggttttttttcttgtattaattctaacttagcaactgttgagtagttgatgtttgaatataagctaagccaacttattagaataaatgttttctattttttacttgtatgtgtgagtgcctgcatgtatgtatgtgaagcatatgtattccaggatgtcagaattgtgatggattccctggaactggagttacagaccattgtgaaccactgtgtatgggtgctgggaactgaactttaggtcctctgcaaaaacagtaaggatcttaactgataaactatctttctagccctaaggctttctacttttaaagttcgtttctctttctctctctctctctctctctctctctctctctctctccctctccctccctcctcctcctcctcctctttcccccctctcgcctcctctttctctctcccctccctctctctctctcacacacacacacagacagagagaggagagagaaaggaagccttactaattaattacctagttttagacataactagtgggaatccatagtaagtaaatcaacattcttgaagagaggttagaagaattggctctcgttgtccatcgaggctgtataagattattcttctgttttctcagcttaccatacatattttctacgtagacaataccaattcaaatacactgtacgtaaagtatatgcgcacacacacacacacacacacacacacacacacacacacaagttacatattgtcatatagtactaaaatttatggactttttcatattaatacatctagagctatcatgttttttatcttttaaaaattactttacggggctacagagatgtctcagcagttaggagcactgactgctcttccagaggtcctgagttcaattcccagcaaccacatggtggctcacaaccatctgtaatgggatctgatccactcttatggtgtgtctgaagacagtgacagtgtactcatatacatgaaataaatctttaaaaaattactttaccatcagggtatatatatatatatatatatgtgtgtgtgtgtgtgtgtgtgtatgaagtatttgctatttgagagggtctcactgtttagctcagtctggcttggaacgttctgtatagcccagactggcctcaactcagcagtccccctgaaaggctctcatatgtggagattacaggtatgtgctactgtgcccagccctacatgttactttgtttttgaaatagggtatcaaatagcttagactggcttctaagtcagtgtgtagctaaggatggtctgagcttctgaacctgctacttcaactcctggtgtgccatcatggccagtttgcacagttgtgagagtagaactcaggacctcctatgtgttactagacatgttctctaccagctgagctacatcccaattcgcctacatttacttttattttttaaaagatttatttatgtatacagcactctgcctgcatgtacatctgcatgccagaagagggcaccagatctcatcatacatagttgtgagccaccatgtggttgctggggattgaactcagggcctctggaagagcagtcagtgctcttaacctctgagccatctctgtagccccctacatttattttaaagattataggctattctattcatagatgtgccataactgatttaaccagatcttcattattttgtacttagtagagtatattagagggaatgaatcttaaatacacattttgacacttgctcagctttagacaagtaaaaatcactggtcaaggaaatggtgcttagtggatgcttctgaactgtcaaattgtcctccaacaagttacatcattttatacttccaacgttatgtgagagttcatttttctttaggctcttctagtattttatatttgagaaataaaatttaaccaaaatttgccaatctagtaagcttgtttttatttgtatctttaaattttatgatagatgttatagtgtactctcctctcccctcccctcccctctcctcctcagcaggatcttgttatgtagccctaagggatctaatacttactctgtagtccaggctgtccttcagctcatgagacacaccatcatgcttggcatgtttcttgttctgaaaggtatctggttttaattttggttgagctggtgtgttggtgtatatctgtaatctcagcacaggcaagtagagacaaggattatgattacagtccagcctgggctatttagagggattctctttaatctttcctcatgccccaaaatcttacctttggtatatgaaaaatagtctccacttctgcaaaatattgctttatgaagtaagaattcccttcatagagacaaggaatgtgtcctgtaaaagtttaatgtgtaagaagtatttgttataaaagataaatattcagaatcttctttttaattcctgattttatttctataggactgaaagacttgctcgagatgtcatgaaggagatgggaggccatcacattgtggccctctgtgtgctcaaggggggctataagttctttgctgacctgctggattacattaaagcactgaatagaaatagtgatagatccattcctatgactgtagattttatcagactgaagagctactgtgtaagtataattaacttataattaaaaaaatagggccattctagttttatctatatttttttaaacttgtgcaaactatgctacataatcaacttacttgattatgtaatatatatagtaatagttggaattactattattacatatttatttttctgtgctggggtagaacccagggaactaagtactgtaataaccgagcttcattcatcctagtcatttttaatttttttttttttttttgttttttcgagacaaggtttctctgtgtagccctggctgtcctggaactcactctgtagaccaggctggcctcgaactcagaaatctgcctgcctctgcctcccagtgctgagattaatgacgtgcaccaccactgcctggcattttttttaaagttttaatttgagaccctttctcactaacttgctcacactatcctcgaactcattacgtgggctggtctagaaatttcagtcaacttgcctcagcttctcaagtagctgggattacaggcaggtgctaccacttctggccatgatcattgttgttgttgctattattattattattatttcactgatacttcatatcacaacacagaatagtaactgtagttcatgaccaacaaaaaagttgtacagtttctctgttgtcttattttgatctggattttgatttgtttcatggcactgggcaggctaatctcaaactgcatggctcaaatagtccttctgtcttaatctcccatgttctggaagtataggtatcactacacctagctgtattttcatatttaaaaaaaaacgcctaagaattgctattgaatgaggcggagagatggctcagcagtcacaagtacttgtagaggactggggtttggttactagcacctcaaagatggcttacaattatctgtagctccaattccagaggatctgtgtggtaaagctgcatgtatatgggcatgcaggtaaaactgctaaacatataaaaatagctcagtcttaagagaattctaggcctggtgaggtggctcactagtcaaaagcactggctgctcttcagaggactcaggttcaattcctagcacttacatagtggctcacagagtctgtccctttagtcccagggatctgccactctcttctgtcctgcaagggcacctggcaatcacataggaaacaaacttgcagcagaaacccccatacacataaaattaagaaaaaaagaattgctattgagacttgatgttttctcaactgtgtatgctggtggcaaatactctcactggagataattgctctgagaggaatcctaagttatttgaagcaaagccttaattattaaggttaatgattatttcttggaaatcagaaaatacttttggcctgggaccactttacctttgccagagtttgaaatgatttagagtattgacagtatgatgaaacaaaataaatgtcatctttatatgtaaaaacttcaccattcacaattatgatggtatagtttgtttcttcctttcctttccttcccttcccttcccttcccttcccttcccttcccttcccttcccttcccttcccttcccttcccttcccttccccctttttccccctttcccctttttccctttcccttcttccccccttcccctttcccctcttccccccttccccctcttccccttcccccttcccatcctttgactctctgtgcagtcccagctgtcctggaactcactatgtagaccaggctagccttgaacttagtgattcccccccttcaatcccagcactaggagtgcaccatcactgcctggttaaaatatgtatttattttaaaattaaaactgcagaaagttatagaaaaaaaagattgtctttccaaagtctactttttaaaaaatagatataattttattttatgtttctgcggtttttttgtgcacatgagtatatggatcatcttgagtgcctcatgtctgcagaggccagaagaatacatgggatcccctggaaatggagtttcaggtgtttgtgagtcaccatgtgggtgctgggaactgagcctgggtactctatgagaatagcacatacttttaactgttggaccatctctctaactcctgtcatcactttttattttgaatattaagagttttctctatatatacatgtccccacatacaactatagcttacataatcagtattagcccaggaggtatttaacaatccaagtgcaaaacagcctaaggagtccaaatatctattttattaaatgaaaaagtccactaattaaaaccactgtatttgtgtgcttttaagaaagaaactacctccagttatagttgtatggtgccatgaattatgatgtttacagaggtagtaaagtatgaatgttcatcttcaaacagtgaaatatagtgttatatatttggtgacattttttctgtccctagtgctctgtaactttcagaaaaatgaaacatttgataagtacacaaatgtgtcctattttgacttttatttcaattttataaaattctaaaatcgtcgaagaacaaaactagaccttgagagaaagggttgttagtaaacaagtaatggtttttaaaagatttattttattttatgtatatgagtacactgtagctgtacagatgattgtgaaccatcctgtggttgctgggaattgaactcaggacctctgtttgttccggcccagcttgctccaacccaaagatttatttattattatatgtaagtacactgtagctgtcttcagactcaccagaagagggcgtcagatatcattacatatgtttgtgagccaccatgtggttgctcaagacctgtggaagagcagtcagtgctcttaaccgctgagccatctctccacccacaagtaatgttttgagttttatttttaagtttgtaattatttgagtgttggatgaatctaaggtcgtgaatatgctaagcaaatatgctctaaatcctgagctcttgtttctatttagaggttgccagaaatcctagtgatggaaaaataggaatacaacttctttcttgtcactcccacttttccatctagactctaagaggtagacaaagtagaaagaaacattacggctgtatttatagaaacctgagcttctggggaaaatatatataaagtgagtgttttgcctgtatacatgtctgtgtaccatatgtgtgcttgaagtccacagagggcagaatagggtgtctggacccctagaatatagttatagactgttgaaatgctggatgctggaaattgaacctgggtcttctggaagccgttgctctgaaccaccccttcagcctcctctggggatttttggtagttgacagtagtgacacctgaatgaaggatgtgagtatactgtagctgtacagatggttgtgagccttcatgtggttgttgagaattgaatttttaagacctctgcttgttccaggcaactctgctcactcaggccctgcttgttctggcccaaagatttatttattgttatacataagtacactcactgtaggtgacttcagacacaccagaagagggcatcagatctcattgtgggtggttgtgagccaccatgtggttgctgggatttgaactaaggaccttgggaagagcagtcgggtgctcttaaccactgatccatttcaccagcccatataacaactattaaatgaaactttttttctctttatagtgtccctttaaaaggaagctgtttccttaacaaaaacttcagggaagcataagctgaaacactgaatgggactgtggaaacgtgaacatcttagcgtgcaagtgttctgtgtgctttggagttctgttgcctcggaccctatagcaatagcctttggatcacacttgcattcttagatatttattccttatgtctgtcctttgaaagaggaagtacttggcattgggctgtaataccatttttctacagcaggtgtcagtatttatcagggtttgttattactatgtagcactcagtgtaatgccatcttaactaggttcaggttttgtacagttctttttctttgtgtcattaatcagttgtgtgtgtttgaaattctgagttttaggctaaactagtttaaattaaaaagccaacatttagtttacagcttggactagtagtattttttgtttattttgttcttctccactccccttaaacatgctaggtaaacattctaccaactgagctatcattttaaaaaaaaattttgagatagggttttgaataccgaataaaaatagttttataggtagtatatttgtctgctacttggtgttactaattagtattgatccacataagaatatattagattgtgtcattctttgtaatagtttcatagtattatttatgtgtattaatttctttaagtaattcccttttaaagacatgctgggtttttttttgttttgtttttgatgactacctgatatagtgaacatttttgaatgtttcccttgcatgtttgtggatatttttgtaacactgattcttggaaatgggattgttagatcaaaataatttgcatgtttataattttaataggcattactatattttttcaaaagaggtcatattgctttctgtaatctaaccagcagcttgagtatttgtttctcctgaatgtattatcaggcttaattgctgtaaatgtggatgaatgaacagtagaatcacatgtagaatctgtcaggtggccatcagttgtctatttgtattctaatagttcttttttttaaagagatttgtttatcttgcttcatgtgtatgtgtgaatgccagcatatatgtatttacaccatatggatgcctgatacatttgagctcagaagaggggatcagatcacctgaaactggaggtataggcatatgaactgccatgtgggtgctgggaactgaacccaggtccttggcaagatcagcaagtgctattaattctgatctctctcctgtcccacctggtaggttcttattttgagcagaatttacattaggaatagtggttacagatctttttagttggagttcatgactagttttttatcctttctaagaatacaggggaaaattatatatattcctgggggctgagagatggctcagcagttaagaacactgtctcttcttccagaggtcctgcgtctgggaattgaacgaattcccagaaaccacacggtggctcacaaccatctgttatgggatctgatgccctcttctggtgtgtctgaagacagctacagtgtattcatatacataaaataaataaatctttaaaataaaatatattcttacattttcttctaatccacttatagttctattttttacatttagattttagtccatctggaatttatttttgtgcatggtgtgaggtaggaaccatgctttattttttcccaaatggataagtaattgaccaaataccatttgttgaataattcatctcttaattactgactcaaaatatcatctttgtcatatactaaattctcatgtttttgggtctgtttctggattttattgggttccttgaactttttgtcattcactgtgctggttctataccaagctaattgctgcagtttttggtatgctttgctgtcccagtagagtaagtccacactcttttaatcatcagttttctgatttaataccagcacatccaaattatagctattcccaccaactctagtgagtgttaatcactctcctttgaaacctctgtaaggttttctgctaatttctctacaagcagaaagtgggaacctaagaaggatgttctaatagactagtaatcagacctggtttctcagacagttctgaagatgacctggatatgggcatatccaggatatggacatattttatgggcatatcttcagggttgaatgtgatatagaccagctcctacacttgtgtgactcacaggaatggttcagggccagaagcagacacctgtcatgctaataaattgtcctttgtagttgagaagtacctgattgatgagtagctataatatgcccactcagaaatagatgtactctagttttagaactcttcagagcctcaaatactagtaatggtcaattaagatttttaatttttactaatctctatgtaaaatttacctagtcattcatttctagaaacctaattcttatactttataatttagaatagcataattttgtggccattagatagctaactttttaaatcttatagcttatatctaataatttgagaagcttatatatatatacacaagaatttgcatttaagtgatgttcttttttcaactagaatgatcagtcaacgggggacataaaagttattggtggagatgatctctcaactttaactggaaaggtatgtaacttgaagaggaaagaaagaacatttttataccaagaaacattagtaactgctttcaaccacttacttagaggtactttattagtaaaagtaagctggtattgtttaactcttagaagtacttgatatagattaatattatctcctggactttatagccaaatgacagcagaatataccattaaccctcacagtccatattgctaattactgctttattttggttttttcgagacagggtttctctgtgtagcccaggctgtcctggaactcactctgtagaccaggttcgcctcaaactcagaaatccacttgcctctgcccccaagtgctgggatcaaaggcatgcgccaccactcccggctttaattactgctttctataatactactttgaaactctaatttgggatccttcagaaaatatagctggagagggacagtcttttttttttaatagattcaaatgtagtttcatttgaaggtgtgtgtgcgcgcacacatgcttctctatgtgtatttgtttttctaagacacagtcttacttagagtctacaccatctttgaacatctcttatgtaagtcaggttggccttgacatggtggtcctgcttcagcctcccaaatgctgggattgcaagcataagcccccatactagactgtgtatgttttctaagcggctggttattttttacttgtaggcactgtgccatatataaatgtattaacctggttactttcacagtaatctagtgaaggcagttatatttccattttgcagatcaggaaatgaaacaatacacttacagtttcaaaaactccttgggattatgagatgtaaacaatctctcgaagtcacgcaaccaggaagtagaaaagcttgcatgctgacaccaaattctttctttcctctagcttttaggtttagtgctcactgctttcttgcactacttactcactactcactacttccttcactgaaactctgtagggaactttaacataaaatgctggtattctggaggcctgtatcagggtcacgccaaactaatgtcgctgtcagcagtgtttagaacctccaggggcgaatttgtaatctgttcgttctcgctctctgcctctctgctgtccatttggtgtacaactgccagacctctttcccttttagcatggtttgtccatatttagaagctattcgaaacctgcccttctataatccgttttcggggctggcaggggcctagccttcgaagcctgctgggatttagtttgaccttcttcacctaatggctctgtctctacacagcgctgtgatcttaaacagagctctgcttctaaaataacttctcagagcagccacaatagattctttttattgtggaaaacatcaaggaatacaaatttagtaaagttaaatcttgatgatgagattatgggtttatttaaaacattctaattttttgtggaaatttatcttatgtgtatgcaagtacagacataatgcacacattttcccattaatacttgaaacggtagtctttggatccaaaataacctttattcaaacccctttctcttgcccttctcaatgtttactactttaggtagttcatttgactactcagcctcattgtttccattattaagtagacatgtagctatttgacaaaataaactctcagtggtagcagttctctctctctctctgtattagaacaatagtctttaaaatgtcccaaatttttatatctttttaaaattttctatgcatatcctgacctttattttttgaaagatttacctacttatttaatttatttatttctatgtatgtgagtacactgtacagatggttatgagccttcatgtggttgttgggaattgcgttttaggacctctgctcactccagttggtcctgtttactctggtcaactccatttgctcggtccctgctcactcaggcccagagatttatttgttactataagtacactgttgctgtcttcaggcacatcagaagagggcaatggatcccattacagatggttgtgagtcaccatgtggttgctgggaactgaactcaggacctcgggaagagcagccagtgctcttacccactgagccatctcaccagcccctgacctttactttaaagtggctttttcctgcctatagaatgggatgcagttgtagcttgtttgccagaagttctgggcttacattcttagacctgtatagcactgtaagatactgccttctatggtaaactactttgaaacatggacatattagatgtttttcttgattataatttccttttaacgcacagctttgattctccaaatgatttacccacagcatatgtatttttaaattacacttgagttttggtagtaatttatcttgtaaagtacttaaactataggctaaaggagatgaagtatgtctttagttactttgaatacacacaataccaaggcaacttataaaagagaacatgtaattgggagcttgcttacagtttcagagggtaagtctgtaatcatcctggagggtagcctggtggcaggcaggcagcatgacactggagcagtatctagagcatacatattacatgcacattggatgcagagagtactagagactagacccggtgtggcttttgaaatgtcacttttgaagcccattcccagtatatgcctcccctaacaaggccacacctattaacccttctcaaaaacagttccaccaacaagggatcaaacattccaatgtaagagcctatggggggaatttttcattcaaactacaaggtgagaaagaattttgaattttcatggactccaatggaggctatgtactctaccttgataatcactaacttaaagtaataaagaagacttggcaattctgatgttatggttgtttggcagagtgatttgagaactatagactaacagtataaaataaatctgtccagtgagtattgtgggcatgtgaaatgtctgtcaccttatctctctaactagcaactcagaccaggcatgataaatcacaattgcaatcttactattcagtaggttgaggcagaaatggtgctgccagtttgaggacatttttggctacattatgagttctaggtcaacctgggctacagagtaaaattaactagaagattgagttggggttggggtgggtttaagggctctggtggatgtattgatatcttttcccagtttcccaaatacgcacacaaccatatactagttttagcttgatggagaaataaaaaatttgcattttatattatgttagatgcattattttaaaagacatttatacagattacagttcttggaatattagagtcaaaatacataaaaggagagctggttcaagtttttcagtttacatatgagtcactgagatcctgagaaatttcccaagtatgaatttgggtaatttcttagaatttgtttaatgatttcactgataattgggaatactgtctcacttcatatactaattttcatttctctgttttcttctagaatgtcttgattgttgaagtaagttctacgtttacttttaatatactgtctacaactttctaacttagtgtgtatggtaataaaggtaagtcgggggcgcttgtgttttctaaccctaagagaagccaggtacagtagggcatgtctggaatcccagatcctcaggaggctcatgaattcctgggttagcctgagttgcatagtgagtttaaagaccgagaaaatccttattttaaaaacaaaacaaaaagacacaaacaaaaaatatattttgtaagtgatgtgttttgctgctcatgaaaaaagttatatacttcctttttcagttttgatttttttcttttaaaactagttataactatatagagaagggtgtgtgtgtgtgtgtgtgtgtgtgtgtgtgtgtgtgtgtgtgtgagtgagtgtgtgatttcatgtgttaagttttattttatggaatgttacaagatttttaacatttcatctaaataatataaaagtatcaaatatttctggcaagtgagtggagtaaagactcaaaccgctactgtctggagcccattgcttttcaatgtgtaaaaaaccaaaagcattagccaggagcttatggattcagaatctttgtgataaaaaccatcaatttttgtttgagcaaaccttgagctgattccgatacatgctgagctttaagacccattgatttactcagaagaaaatgagaagacactgtctcattaaggccttctttggctgtcctacataaaaccgtacatttccatgtcttcatcttcctattcctttccatacttttttttttatcactgcctacatgcagactttattttttgcctgtggcttccctgtttcacatctgtctgacttgctgaactctatacatgtacgtctataccacagattgtggtcatcctcctaccttgactctattccccagttcttcaggatgcatcttaatagattctcattgtggcttcagaatatatatcagcttcattccccatcatttttcattctttatactttttgcatttcctagagcatcatttttctatcttcattttctgtccctagtagttgcttttcatttttgtaatctcttgtttcctttccactttttgtagtatttatgtttgtgcattgttttgtgtgtctgactgggtatgtatgtgtgtgcaagtatgcatgctagtgcataagaacagaggccagtagaggatgtgtgtgccatcctcttgcacttcctattctatgaggcagggtctctccctgaacctgaggctcacattttcttacataggccggaagctagcaaaccccagcaatcctcctgcctcctgtcttttcagacctgagttgtgatggaagcaggatgcctggattttgtgtgagtcctgcaatgcaaactccagctactatagttaaccactgagctacctctccagccccaatgcccctattttttttttaaacaaaagaatttttattctttcttttatgtgtggtgctagggatcaaacccagagcatgctaaataagtgctctaccaccaggcgtcacccttgactctttagggttttttgtttctttgtttgtaagaggtaggtaaatatctcaggctagactcttactccctccatcccacctgcctgtacctctcaagtcaagtgctgggattataggtatctaccatcatttgcgtctcttcttccctccctctttctcttattccatccctgctgtcttcctcccttccctccctccctctctcctttcttcttttcttcttttctcccttcagcatgatcttgtcatacaactcaagatgagtgtttttccttctatgagacctggtcttaatgtagcctcctcatctgtcctgggtctcactatgtggaccaggagcctaagccttctgaatgctatccattacaattgtgtgccaccatacctgccctccaagctggctttgaacctactgtgtaacctgtgctgcctgtgaactcataacctctctgcctcagcttttcacatgatggaattataggtgtgtgccaccattggttggtttgtatttctttttaagatctcttctcttttttcaattagttttagtctactgcattttgattatgtttgcgccctctctctactcctcccagatctctcttcccttccctacctacccaactttgtgtttctttatttaaaacccatcaacacaatttgtgctgctcctgtactcttggatgtgtgaccatccatcactagaatggtcaacccaccaggagacacatccttaaagaaagctgagtcctctagccgcagctatcaatgatagcttcctcactatgggtgggacatgatgtccacctcccccactccatgctgggaatttgtctgtctttgaccctgcacaggttgtgtgcatgcattctcaactgatgtcagttgataagtgcaaatgttgtactgtgacagaaaacattgtttctttatagttgtccaccacctctggttctttctctttaattaaaaacaaaacacctttgtgcttgcatgagtaagcatgacacagaatgcacatggaggtcagaagagcgctttgtataactgcttctctcctttaccacttacatggaatctagggattgaacttagctcactaggcttgcatggtaaaatgtacccacaaagccagctatctgggcgccgttcttttaagtaacacatctcatctccctccctacagagcaatcagtatccttcgccatcatttcttatttctttctcccccttctccactttctaaggtttattttttgaggacataggtgagtgggattacaccgtaattgccctttgtgtttgaagaggatctcactatttctctctggctgtcctggaacttgctatgtaaaccaggctgtccttgaaccatggcaggtttataaacacacacacactccacaaataaaataaacgtagctttttaaaaaaagttcatgtaggatgatagcactgtacagtttctggtgtgattggccagatgagggacaatttctccctgactatccaggggtagctctcaactacaaagatcatccctcaagtcctacgacacagccctgtcacagcatcacagctttttaaaccagcaggagagttaggtttcgagccctgatattcgttgtggtctatctgttttatggatttttatctgttttctgattttttttatggtactggagaatctagggcataatgggtgccatgtgggtgttttatcactgataaagtcattttatatagtaaaacttattacttagatgcttttaaagataatacaaagtgggctggagaaatggctcagaagttaagagcattgtctgcccttctagaggttctgagttcaattcccagcaaccacatgttgactcacacccatctatagttagatttggtgccctcttctggcctgccagcataatgcaggcagaacattatatacataataaatctttctgtaaaaagataatacaaagcaatgtttcttagagtatcaaagtttgggatgttaagagtccctatctttaatttacaaaaaaacctactatatcttttacagaattaaacctggtaatttatgcctgcaaccctacctcttaggagtctaaagtagggggatcttgagtttaaggccaccaacctgaactacatagcaagaccctgtgtgaaatacaacagaaagatttgtgtatgtgtgcagtgcttacatgtagacgttccatttactgtttttgaccttgccacatctatgcaatctagttctggggactgacattacctctgcttacttagagccagataggttacaagttccagactatctctgtgtgaattgtggtgagattttgtgtatactaaaaatgaatggcattgtgtcgtggaatactagaatattgcatttggaattgtatgtttgtaataaggatgattttttttaaattgtggtggttttatttaccattaaatgtctcttttctttttaaaaggatataattgacactggtaaaacaatgcaaactttgctttccctggttaagcagtacagccccaaaatggttaaggttgcaaggtatgtatgccactttaaagtagaatgctttccttatttagaatattaagtgatagcttctttgtaaggagacatgctttttcagctttcgttttatcattacagagtaatgtaatcttaaaactcaagacagtagcctttgtaattttattgtgtattaataagccattatagtcaattccttgtctaatacagtatatataaggccttggatctagaactacctcagatgctaaactccctagatgttcaggtccttcataaagaatgtcagatgagctgctgagatggctcagtgggtaaagtcatctgctgccaagcctgacaacctgagttcaatcctgggacgcatgtggtagacagagaggactgactccctctgacctccatgtgtgccacactcaagtaaaataagtgcaattgttaatggcaggagtgtttgcacagaatccatgcatactctcccatacactgtaatacctaccacagtgttaatacatataattacgctaaattatttagggaaatacatatctttatagtatgggttcttagaatattgtttatttatgtgtgtagtatatgtattatgtgcaggtgagtacacactcatcatgcagatatgtgaagggcagggcaggactgaatatcctgtactgccctttactctgttgcctgagacatggtctctaactgagctgtaagctcaaagttttagccatgcaggctcattggtgaggtttttgaatctatctctagccccagcgctggggtcacgaacacatacagccatgggcaactttttaatgtgaatattaggagtcaaactcaagtgcttgtgcttgcagaccaaatagtcttatccatggagccacctccccagtccctagaatgtctagtcttgatacacaagtttttagaaatggaactctcacatatatacagagctatgtaacaattgctgtttcagcatgttacttatatcaaatttatcctgagtgacatggcatatgatctgaggtccccttgtgaaattgaaataaatcataccaaggtagtaacaagtggtggacactgcacatctgaatcttctggattagagtggtgagtgaggcattctattttgtgttgtcactgaaattgtaccatgcttgcttcctttttctgaagtctcaaatcttactatatctgggtatttggcttgtgctttcatagttttctgtttttatccttggttatagtttgattctacaacagttgttatctccaccttatagataaggatactgaagcctagggaattgcccacagacacagagctaataagctatagagagaagatttgaacacagggaacctgtcacagttgatgcttctgctattttaagttgggttttgttgttaaaagtgacatcttttttgttgtgttgttgctattgctttttgctttatttttactttatagtttcatttttactttaatatctttgactgctctgtgctttttgtgtagaggagaggtcgggtcttttatttttgtcttttcctgaatgattaattggctcttaattttttttaaagactttacttatttatttattatatgagtacactgttgctgtcttcagacacaccagaagagggcgtcagatctcattacggatggttgtgagccaccatatggttgctgggatttgaacccaggaccttcggaagagcagtcagtgctcttacctgctgagccatctctccagctcccggttcttaatttttgaaaatttacacttatttattgtggcaggaatattggcacgtgccacttgcacttgtgttggtcagaggacagcctaagattctttctaccttgttggtcctgggtcggggtggaacatagtttggcagtcttgatagcaatagtctcatatacactgtgctatgtctgctgaccaattaaactagctttataaaatcgttttaaaagatcaaagtatctataaagtctttgaatctctataattttaataaaacttatttcagcaatttgtcttcatggactttttggatagatggcacaaatatacctcagtgagtttttgccatgctgaaggtgagatgtgcccagagaatacttgggtaatttttgatgatgtagttgtcctacgcaagtgtgttttggtctttccccaaactaaaaattaagtcttatttggtagtattgtaagatagcgtggtcactctagaaagcagttttttttaaaaactgcacagggaactaccagaagaccccagacgttgtgctgagtacttatccctgagaagtgaccatgttgctataaaaatctgtattggtttatagtcaggtatggtggttcacccctgtaatctcagattttggaaactgaaggcaggaggatcacactgaatttgagacaagcagcctgagctatatagtgaagacctgtcttctatctccctactcaaatacgactgttcacgtcatttgtgataatgcagaattaagaagaacaaaatttgaacaaatttgaagcacatttataccacgaaatcagcaataaataggaacagccatcaatatgcagcagttgagatgagtgttactggagctgtacagtgcttcaggaggacataaagcaggtgttcgctctttctgtttaaatgcttacctgtctcccagttttgatatgcccaagatttttaatttttttcaaggctattataatagtaggacaccaaaggcaaagcaataaaactgtatgattctacttatataaccccgtttgaaatgacagatgagaatggattaggggttaccaggggttgagagagaatacaggagggagccttgcatgagtcagagtatcttgattgtggtagtgattagactagtctctatgtgattaaaattgatgaaatctgtacaaggccgcttagttcaccaaggcccatgttctggttctgataatctgctgaaatacgacactagagacctttgtgtgtgatttttttttttcttttgtgacttcagtgaaaacaaaaataaaaattttgaaagccattaactttttttgggcgatattagggtttcaactctggttgtatgcatatatgacaagcattagataactagcatttaactttgtagttttatataattatgtaatcaaactacattcataaattcatgatttctataaataataaaggtataaatttaaaaataaaactgcttaaaacttacatttttagcaagagtcaagtagttgaaaatgtaattaactaaaaaattgagtgagtaactcagtggtcgagtacattcttaatgtgatcaaggctctgagttcagtatccactgcaaaaaattcccattggtgagccagttattacaagtcctgatgaaagagcatgtcttaccttctttagttaggattctgctctcagaagcatcttaccaggttccaggtggtgatcagtcgggggccttgaccttcatgtgacctctctgtgatttagttcttctccctttcagccttcctatgggtctgcgaagctgtccttattctgaatgcagatgatactacttaagaacactgatgttttctttgtaatgctctgtagtctttccatatgccacatgtaattttttgtaattaacagcttgctggtgaaaaggacctctcgaagtgttggatacaggccagactgtaagtagatgccctttggccaatcatttatccatcttataactgaaaaagttaactatgaaatggcttagggttactttagagaacatttgtgaggaaggtacatttgcaagaattagaattgaaagtattattttctctaaagaataaactatgattatttatttacagttgttggatttgaaattccagacaagtttgttgttggatatgcccttgactataatgagtacttcagggatttgaatgtaagtaatgcttttttttttctcgctctcatttttcaaaaacccacataaaaattgaggaaagggaagaattgttttctccttccagcacctcgtaatttgacccgactgatggttcccattagtcacataaagctgtagtcaagtacagacgtccttagaactggaacttggccaggctacggtgacacttcttgctggctgaagtagttgaacagctttaatatacaacaactgtcttattgttatttcacatgatatagtcataagtaagaaataaacgattcagtttcaattttgtaattgactctgcttcagatccctgcctcccattctggaggcaggaaggagtcttctgggtgagtttataagcatggtccaggagcagttagaaagtctccatgggcaatattacctaaagcgtattttttatttcacttacctgttttgatttcagctttatgtttctcaaagttacgtactaagacaaagaaaaagcaaactaatggactatagttctgctttgttttcaaattatgtcctcttcaagttgctggtccaaaataccttgtttggtagaaacccagacaacgtaggaggaccctttaatgctgttattacctctttagaatccgcttttctaacgagaatgtcttttattttatagcacgtttgtgtcattagtgaaactggaaaagccaaatacaaagcctaagatgagcgcaagttgaatctgcaaatacgaggagtcctgttgatgttgccagtaaaattagcaggtgttctagtcctgtggccatctgcctagtaaagctttttgcatgaaccttctatgaatgttactgttttatttttagaaatgtcagttgctgcgtccccagacttttgatttgcactatgagcctataggccagcctaccctctggtagattgtcgcttatcttgtaagaaaaacaaatctcttaaattaccacttttaaataataatactgagattgtatctgtaagaaggatttaaagagaagctatattagttttttaattggtattttaatttttatatattcaggagagaaagatgtgattgatattgttaatttagacgagtctgaagctctcgatttcctatcagtaacagcatctaagaggttttgctcagtggaataaacatgtttcagcagtgttggctgtattttcccactttcagtaaatcgttgtcaacagttccttttaaatgcaaataaataaattctaaaaattcgccactttttgaattctttcgtgtaaaagtccttaaaactaaggactgtctctttaaagaaattctccatgtctgtcatttctctacagattaattcagtacagttttccatgggttcccctttgcttacgttttatagctaatttaatggtactcctcagcaagtattgcaggtcatggttatctggtggaatgggttggtagagcgagggaagcgtctacctactggaaacagtaaattacagacactcagcaccatttcctaacctgtcttctattaaaaagaacatgttttctcctcgttttctgtgaggttgttcagactacaatctgacctatagtttgttttcaggtatgtcctgttacccttttggtttggataaagctttattgaccagagaacagtaacagtaaaacattgttttgtcttttgggagtaagaaatatttgggaccaaaagtcctgtttgccctcttgttatcacgaggtatgagctagcaaccttgtagcacagtgcatatttacattcctttcagactgtgttcttatttccagcagtgaagtggggaactttaaatgataacaagaacttgctgcagttaggctggtgaaatgggtcagtgggcaaaggtttgctgccatccctaggagcacctgcatgctgaaaggagaggactccagaagttgtcccctcgcctccacacacctactaagctgacaaataaatgtaattaaataaaaaggttgccaaactcctctaacttcctaatttacaagatatgtttccttctgttttctcatttcttctgcatagcctggtggtattaatgtgaatgcagtgtcaagtaactcctgagtcctttcctaccataaaataacacctaccgaggtccacctggatcctctagttaacactttgctcggcccccactgcagagccttcttagtcctttcattccgttgcactatcacctctgttgggttgagccatgtaagatgaccatttttttataggtaaagcaattccctacttggctgttggcagtttgaggtgattaaatgaatagcatgccatgtagtttacatttgtttgtttgtttgttttggttttttttgagacagggtttctctgtatagccctggatgtcctggaactcactttgtagaccagattgacctcaaactcagaaatctgcctgcctctgactcccaagtgctgggattaaaggtgtgcgccaccatgcctggcttgtgttcattttttttttttttttttactatttgcctaaccccctgctagaatatgagttccataggaggcaaaccaccttgtttgtgacaaggtctgtctattacatacttccagctgtcctagagctcactatgtaaaccatgctggcctcgaactcacagccagccatctgcctctactttcctagtgctcaaattaaaggaggtgtgccaccatgcccagcaggcaaaacatttttgaactatctttttgtctatactgaggcagggctctcttaatccagactagcttcaaactcaggacacttctgcctctgcctgccaagggtgtggattctagctgagttgccatctgtcattcactggtgtgcattagatgagttgatcagtgccttagaaaaataggagcttaggggactgtcgagatggctcagctcataaagagcactgactgctcttctgaaggtcttgagttcaaattccagcaaccacatggtggctcacaaccacccataatgagatctgacgccctcttctggtgcttcggaagacagctacagtgtacttatgaataataataatctttgggagtaagagagtggggttgactggagtggggaggggtgaccagagcaagcagaggtcctaaaaattcaattcccaacaaccacatgaaggctcacgaccatccatacagccaaagtgtactcacatacattaaataaataaataaataaataaataaataaagctttttaaaaagaaaaattaggagcttacatgatgattgttgaatgagtaagtagctaagagctgtgtagattctctactctttacttaatttggcatctaattactgacatttacaacctggtattgggagtggtgttgtctttttctcttccatttttggaggggtgcactccttccataaagggtgtgtggaggtcaaaggacaactttggggcataggttctcttcctcccaccttgtaggtgtcagcacgaattcagggcatcaggcttggcagcagtgcctttacctgctgagctctcaccagcccactactgttttcttttaattattttttatttttattattattttttgtttgtttgttttggtttttcgagacagggtttctctgcatagccctggctgtcctggagctcactttgtagaccaggctggtctcgaactcagaaatccacctgcctctgcctcccaagtgctaggattaaaggcgtgagccaccactgcccggctccagtactgttttcttcatgggcctctctgaagcattcattagctacaataatgaatggtggctcacaagcatctggaatgggatccgattccctcttgtggtgtgtctgaaaagggacataaataaatcttttttaaaaaggaaagaaatagggcaggtgagataggaccttgacccgagattaagagcactgactgctcttccagaggtcctgagttcaattcccagcaaacacatggtggctcacaacactcagcaaccacgtggtggctcacaacactgagcaaccacatggtggctcataacactcagcaaccacgtggtggctcacaaccatctggaatgggatttgattccctcttgtggtgtgtctgaaaagggacataaataaatcttttttaaaaaggaaagaaatagggcaggtgagataggacagtgacctgacatgtgacaaatgcccccacaacattagttattactggaaaaaaaatgcttcaaaagttattgttaaaccatgacagaacccagatttagcccagatctgcctgatacttgctacagtttatcatggaggatttttctgtttttagtataatgttttagctggttgtctaagccaaccagagtgtagctaacagctgggaaagaaagctgcatttatttaacctaacttgagggtatgtaatgctgataattttgttgagttagagttctcaataggcctaagttggtcttgaactgaattctttttttttccgcccccacccccacccacctctatcccttgaactgaattctgttgctgaatgtctttgtgcttttgatcctcctgcctccacctcccaaattttggaatttaacccagtttatgtagtgttagaggttgtaccgagggctttgtgcatgttagacagtctacttcctgagctatattaccaaccccctgacgatgtcatttttaaaaaccaactttccacaaatcaaatatagtcggtatgtaagacagggaaagggagtcactgagaggtagcagtcattttcagggtaacaggaggggtaaaatctgaaaggaagctgtactttgctgtggctgttcagtataggagcaaaatgcctacaactaccccacctcagtcctccaggacttcattttcattacagtcctgcaaaatggatgctgagaaagaaaacaaaattgcgttaaagttgttagaagttgttagagacataggaaagcatatatccattttaggaattataactggagggttttttttttggggggggcaagggagcagaagcccagggaagagcatctccaacaagctagactcagccacccacccccaatatgcactaaaaaaaaaagtcattgtgagaagatttatttaggggctggagagatggctcagcggttaagagcactgactgctcttccagaggtcctgagtttaattcctagcaaccacatggtggcccacaacactcaactaccacatggtggctcacaaccatctggaatgggatccgattccctcttctggtgtgtctgaaaagggacataaaataaataaatctttttttaaaaaaggaaagaaaagatttatttaatgttgcaacgttgagagggataaaggggtctagtgactccaagataatccagagtacccgcatgaggtttagttcgagatagaagaagctgggggaaaatgtaagagaggcatgattccgaagccctgaccaagccaggtttggttttgcaagatgagcccgagaaacccttatccctgtcatcgtttctcccttgagggagttatcttggtttctgcagctatcactctgctgcagggtatgtcgtcatggataattactcccacctgtcctgcaagattccgctgtcccatgattcctaggtaactcgaccaaaggttaaggatgacttacctctgtcctttcagccagacaaaatggaagcagaaatcccaggtttttagtaaccttggttgagtctaagtgaggagacaatacattttttttagatttatttatttttcttttatgtatatgagtacagtgtagctgtcctgatggttgtgagccatcatgtgatttctgggatttaaactcagggcctctgcttgctccagcccaagacttatttattactatatttaagtacactgtagctgtctttagacacaccagaagagggtgtcagatctcattacggatggttgtgagccaccatgtggttgctgggatttgaactcaggaccttcagaagagcagtcagtgctcttaactgctgagtcatctcgacagtccccgagataatgtgttttaacagaaacatctaagcacgtatttcaagaatattgctgcctaagaatgtgttgctggtctgttacataaaagcttttgcacttctcctttacagattcttagaatcatctgtaaatattggtaggtccctattttaattctctatggagaggatttatagatgttaactgtgttaccattaagcttgtaaggttaaccaagtggtgtccttccctgcattcaagattctagaaacatttttctctgttccatgtgttggggaatacaagctagattaattctagttagagaaacagacattttttaaatattattttgtttttatttttgcaacagggcttcttctggccagactgatattacagatgtgtatctgctaccaaaaccaggcttaaaaatcagactgaacccaaggccttcttacacatgctagccaagttctctaccattaagctactccagctcaaagacaacttgtgctgtgaaggaaccaggagaggcaggccttgttcttaggtgattagggaaggtgatggcactgggaaggtggagatagaaggatacaccagaagagtacatcagatctcattacagatggccgtgagccaccatgtggttgctgggaattgaactcaggacctatggcagagcagtcaatgctcttaaccactgagccatctctccagccccagaaattcaaaagctatcctcagctacataagaagttccagatcaggatggtctatgtgaaaccctatctcaagaaaccaaggaaacaacaaatcctttagttggagctagaagtgatggtgagtgagtactgtttatttcagctactcacaaggcaagggcaggaggatcatgaccccaggtgttcaaagccagcctgggcaatgtagcaaggagcaatttcaaagacaagaactaaaaggaaaggcaaaaaattatatgctttagttaaagtgagtttctcttctgctggaatcctttgtgggactcagttttactaaaaaaataaaataaaataaaataaaataaaataaaataaaaaagccaagtcctttagtgatggagaaactattcctcattatgacaacctgacctggtcatgtccaagcaggctctgggatctctgagctggcccccaaattacttcaagccctgggactgccataaatgcctcccagctgacctctagctcctcgtttcagtgccttaactcctcaccctgtacttgaagtcatttgtgattcacttcacatgaaaagcatgcatgtataccttattcatatagaggtcagaagacagcctgcaacagttggttctcttctaccatgagggtcctagaatggaagccaggttcttaggcgtggtggcaagtatccttgactactgagctagcgttccagccctatttttgtttatttttactatttttcaaatttttattcatttattttacttttgagaggaagatgatcttttccaagtataaatcatatcacttccttcgcacttcagaaaacaaactgctctgtggcctacaaacccacatataagttagcccctgctcacttctctcttttatccctcattactccttcgcctccaccacagcatcattctaccagtccccaaacctgtctcagcatcctgctttcccctgccccttcaccctaacattccttctcaccactcagcagaatggctgcttcattggtcaccttggtgaaccctgccctgaccactggaaccacctcaacatcacattccattatagttcttagcattatcagagccaagccgtcctacaaagcaacacctacaaaggctagcttgggctcatcatagatttgcctgaaaaagaaaaaggcccaagtgaatacagagacttttgggggtttgttttgtgttgtttgttttttacttagaccatggaaaccagcatggtgtcagctccccagatcccaggtcccacaggattgctcagacagtgggttgctgtcacgggaggtcagttccagattccagcctaatgattttatgacctgcagctgtactcttattggggaggcaaggtcaaaagtcccatgcctttccagaacccaggaggcagcctccacaagatagggaggtgggtgaaaaaacagccttgggacaactcacaagactgttcaggggaggctctggggggcatttcttcaagacagggaaagctgaagttatccttgccgatatgtgtagagaggtgttcctgacaccaccttctatataccttaaatcatctttatattaccagtaatatatagcactatatgaaagttatgtaaaaagttgttagactgtattgttgagggaatgaaacacaaaatcctgttcaatatggatctgattttgtttttcaaaaatttacaatctcaggctggttgaatccaaacattcggaacccacaggtacagagggaaaacatttttggggggttgagggtgaaagaacccctaattgttggttactgagagtagttaatattttttaccattattatatgtctgttagacagtagaactgctttgataagaacttttgttttttttctttcatctcaactttacagataatgaaatgcaggtccagagagggttgaagattttcccagatcacgcagctagtaaatatcagataaggaatttaaacagaggcaattttattccagaatctttctgagtaatgcactgtcatttaagccaaattttctgtagaaatgaatacactaacaatagaggaaatgcattaagctgattgcaggtaataatcagaaattacttagatatcatacatggcttttggagggcccggctgaactttaagcatgccttttgactttctgtggcattagtcagtattttcaaaggcttatagacctttttaccaatgggctcttcacatttttcttctggcctattttacaatcttgtgggcagcttcagacaaaataactttttcgtatggaggattatgggtgctctttgccatttgtaaatgtgaattttatagacacccccagccacttgaaagagaaatgcttttaattttttttatgatgatttgtaacctcaagtgtttctgataaactgtcaaattaaatttcaagtttttgctttatattgtctgaatgcactttgtaacgggcttcctcattctgactcgtgactgaagtgactttcaaacttgatagcttttcggcagcacttcctttcctaacacccccgccccggctgtccccccattcaaagatttgcttgtaacacacatggcttcctttatctagaacttttactttgcatacatagtgtatgtagtgtgtgtgtgtgtgtgtgtgtgtgtgtgtttgtgcttgttgaggacagaagttgtcatttgatggtttcctcaatcttcattttatttactgaattggagttccttactaagcctggagcttgctgatgatctagctagtctagctctacccagcttgcccttgaatccatctcacctccagggtgagtgttggaattacatttgggccccaatgctaccagtttttctttctttctttttaaaatgtaagatctagggatcctaactctgatcttcacttttcttctttctccactgagccctccctggaacttactgctctccattttcccaccagcccttgtgatctcttgtcacctgtctctctctttttggaacacaggacattacagactcacctgtattgtcctttccctggtctagactcaggcattttctgatgagccctggttcctttaaaaggaaatggaattagaattgaagatctgggcactggggatgctcattgctgttggaatgtcattggttgtagggtctctcaggggacagtgccaggtaaaacaaacagtcatactaatcctttctgtcatatgtcaaaatctgtttctgtgtttgtctaggtacaggttaaagtaaacacacatctaccctgctccacgctagggtaaattaataaacaagtttcattctagtttcccctcttttctaaaaactctatttttctttaagcaatttttatttgtgtgtatgatgtgtggagggtacatttgtgccacagcatgtgtgaggaagtcagaggatcactgtgaagcagatcctctcccactgttatgtgggtattgatgattaaactcaggttgtcagggttacacagctagctctttacccactgagaatcttggcagctcctctttccttattttcaatttgtttcttcaacagtgagagctatgattcttggtatatactctattccctcatttactttaccttagtatcatgaaattacacatactggtaacaagctgactagacagttatgcatgtatagatcttttattcctaaatcttttggtacccaatcaaaacttcatgttttccataaccacttagttattttcttctcccccaatttgaatatcactgtgttatttgtagcagtttgcttggctggagtttatatcctattatgccctcatttaccattctgtaattttaattcctattaggacaaacccaaacaagtcagagccatacagaaaggtctagtcaaaggaacttggttgtgtgtcaactgttttcaaagaacttgatactctcctcatgtctcatttgccagagtggatgttcaagcttatatttttaaaatatgtgccatatctactatctatctatctatctatctatctatctatctatctatctatctatcatctatctatctatcttgagacacagtcttactctgtagtcttggctagcctggaacttgtagcttgtaactaattggctatgtagaccaggctggcctcaaacacctagagatccatcttcctctgcctcctgagttctgggattaaaggtctgtgccaccatgacaagccttaaaattaacttttaatttttattgtgggacagctccatacatgtctataataaacttagagctttttctcccccagtgctctatatttatcctccttccttctcctgagagtcttcttgttggtctaatgagaggctcttgctaccaagcctgaggacctgaagtcagtccctgggcctgacgtggcggaaggaaagaactgattctcaagagttgtcctctgacctccacgtgggtgctgtggcgtgatcacactggaacacacacacacacaccactacaaccaaacaatgaatgaatacataacataaaaaggaatcttcaggttctaacaaatttttcctcgtaattctcatatggatttttaaagccctcttctgagtcatctccctcagaatacattaaacctttccaggttttgataaggctggaagactcggagactcggacgtgggaaacatctaggaatacctgctgtggtctctagtgttgaaaaagtaaagttttgtgcttgttgagagaaaaaaatagagatcacggagaaagttttaggtggtcttttgggtttttttttttggcattctggtttttttaggggctagtgtagcctaggattgtctcaaaagctttacagacttgagtgtggccttgaaatactgatcctcttacctcaaaagtgctacggagtacttgggaaacctgcttccttacagtcagtccccagaactcacagagagaagccaggcttgtgtggagctcagttggtagagtgcaggctgatggtgcacaaggccctggctttagtcacccaccagtccccacattttttttaatttctttttttaaaaatgttttttattattacgtattttcctcaattacatttagaatgctatcccaaaagtcccccattccctccccccgacttccctacccacccattcccactttttggccctggcattcccctgtactggggcatataaaatttgcgtgtccaatgggcctctctttccagtgatggctgactaggccatcttttgatacatatgcagctagagtcaagagctgcggggtactggttagttcataatgttgttgcacctacagggttgcagatctcagtccccacattttgtaaggtgaaaaccaacacctgtaagttgtcctctgacctccgaacactcactattaattgggaatttctcccacccagtaaatagatagaacaccgttgtcttcgatataatagtttcacaattgaatactacgtgagctcttaaccattttacctgctttcagaaaaccagagcactgatgagtcagacctctgggaattgtgacgtgtgtattcctgtcacctgcttctgccgcgtggcttctttcctaaagccagttgcccctggctgtccatctgctcagactcgaaaacagcttttttttttttttgttccgcataccattttcccctgattttaagtagttcgatttttgagctgggcatgttgagtttgagtctaccttgggctgtatagagagcctgtttccaaaaaaacaaaaaaaacaaacaaaaaaaaaaaaaacaagttatgcctctttatacagggagtctgggtaaataaaagatcttttaaaattagaaaaatacaaactagagataagttacaaccatcaagtctttctgtgctttatgtagtactaagaatctttgcttagttggttgtttatgtttggtttgatttggtttttagtttttggtttttggttttcaatacagggtttctctgtgtagccctgactgtcctagaactcactccgtagaccaggctggcctcaaactcagagggatccgcctgcccctgcctcctgagtgtaaactataccttttcttactgcctcctcacgggtcttgctctgttccccacatccttcctgctccagacagcaccgcccctctacgttttcaccttcctctctgttcatagttcttgggtacaaagagagggaaagaagaactcaatttaatctagaagaagcacagtgtgtgatacactgttttggaaaacaaacaaaaaaaggtttagtagttgtactggctagttttgtgtcaacttgacacatctggagttatcacagagaaaggagcttcagttgaggaaatgcctccatgagatccaactgtaaggcattttctcaattagtgatcaaggggtaaaggccccttgtgggtgagaccatctctgggctggtagtcttggggtctataagagaacaggctgagcaagccaggggaggcaagccagtaaggaacatccctccatggcctctgcatcagcttctgcttcctgacctgcctgagttccagtcctgacttcctttggtgatgaacagcagtatggaagtgtaagctgaataaaccctttcctccccaacttgcttcttggtcatgatgtttgtgtgggaatagaacccctgactaagacagtagcatacttaaaaagaaaattaagtttgtaaataaaatgcagccatctaaaattatatttatgtttggtgatggtggtgcactcctttaatcccagcactctggaggcagaggcaggcacatctctgttagttcaaggccagtctggtcaacagagcgagttccaagatgaccgaagctacacagagaaatcctgtcttgaataacaaaaagaaaagaagaaagaaacaatgaatgaaagaaagaaagaagaaaggaagggaagaaggaaggaaggaagaaaaaaataaaagaagaaagagaaaaaaaagaaatatttgtggggctagaaacatggctcgtcttaccactaagccagcccaccagtgttggatccctggaaggaaggaaggaagaaaggaagggatcaactcctgcaatttgtcctcttacctccacactacttagcacccaatccacagataaacaaacaaacaaacaaacaagcaaacaaaatagtgtttctgaagactatgtagtaattattttataactcctctctagttttgactgcctactcttccaaagatttcatgcataccaacctgaattctgacaaaaggcctgtgtagactgtaacatgagggaactgagcctcctccagctgtgtgccctagagaagcagccagcctccatgtctctatgcagcccacttgtaagaacaaggctccaactagcaattctctccccagggcctctactttccattggcacaggacctgatagatgtgtacaataaatgactacctagtacccactagaaaactgggtgtcctgaaaatttcaaaatgacaaagtaagaccaactcatgacagttctaaaagacagttctggtggacaatttttgtcattttggattaggtaagacattttgttgtattttcagataggatctcatgtcttacatagtcaaagatggccctgaatttctggtcctcttgactaccttccaagtgctgggggtgtactactatactcgctttatgtcatgctgaggatcaaacccaggacttcaagcacgctaggccagctctttaccaatttagctatgttcccagtcttaggggagaccgttctaagcatgatatccatggcagaaacaaaggcacagctccaaaagaggtgactgcacaacaaaacccacttctgaataatagaaaacacggaattagggccggagagatggatcagtggtcaagagcactggctgctcttgcaggggactcagcttcagttccaagcacccagtggttgctcacgtctgtctgtaactccacttctagggaatctgactccctctttttggcctccctgggcgccaggcacacatgtagacatggtactcctacacgtacaataaataaataaatcttaaaaattggatcatccaagagaaagatgtctacaagtagaagtaaaactaaaaaaaacaaaaataaataataattggaaaatgagaagaagcagagagaaagatgaaatgttttatagagaagatttttaatacacgaaaaattgaaaatactcattcaaaggaattccccccccagaaaaaaatagacaaagagtctaaatagtaaagcaagttatcatggggacagagcacttttgacccagctactactatccaccagccactgtggaacagctgccctgctgaaaacatgtggggtttggctctttattgctccttcacctctactccacatgatttgggtttcctagcacacagtattctttttttgttgttgttgctttttaatggattttatatatcttacttttcatcaggaacaaagagggggaaaaatcttgttagacagcttctgctgatgcttagttaacttgatacaacctagaatcactcagcaagcaagtgttgatgaatgattgctctgatggctgcttgtcttgattgttttgattgacgtgggaagtcccagtctgaaagcacttgacgtcatttgctagtttggagtcttggatatgtgagagtagagaaaactacagggctgacagatgactgaaaggttaagagcactttctgctcttctgaaaaatccaagttgagttcccagcacctgcatcaggtggttcacaagcacctctaactgtaagcttcagggaaatcagtggctctggcctctggaggctcctacactcactcacggttacacaccacataaagatagacacacatacacataattacaaatcattttttaaaaatcctttagaaagagaagagagccaagtgtggtggcacacaccatttttttttttttttttttttttttttttggtttttggtttttggttttgttttttcgagacagggtttctctgtgtagccctggctgtcctggaactcattctgtagaccaggctggcctcaaactcaggaatttgcctgcctctgcctcccaagtgctgggattaaaggtgtgtgccacacacctttaatcctaacactcggtaggctgagggaggcaggactctgtgagcaagaggtctgcctagtctacatatttctaggccagccagagaacacacatagtaagaccctgcctaaaacccaaacccaaaccaaacaagaccaagaaacgtggagaaagttagctgaacactaaagatgcatgtattcatttatctctgctcttggctgtggatcttatatgaaaacgattctcaagctcttgacgctatatgactttcctgctatgacagactgtagttaaaacaatgtgcttgctgagaattgaactcaggacctctggaagagcagtcagtgtttttaactgctgagccatctctccagccccagcaaaatattagttaacaaaaatattagtggtattaaatataaaatttgcatgctcaatttctaaaataagtaaatgagctatttagtaaggcatatcctccgaagtcggcagctatcagttaggagacttggtttttgagacaggatcccatgtagccaaggctggcctcaaaattgctatgtagctgagggtgactttgaactgataatcctccttcctccacctcccaagtactagtattataggtatgttctaccatgtccagtgaagggaaagataagtagggctctgaacactgcaaagacattgggttgtggttattctgagaggtggtgggctaggaatgtagctcaattggtagaatgctttctagcatgcccaaaggcctgggttcagtccctagctccaccacatgagtggggtgtggtgatgcatgcctataaactcagaatttggaaaacagaagcaggagactccagaattcaaggacatcctcagctatatcgcaaattcgaagccagcttgggctacatgagacactgtctcaaaaaaaaaatcagaatatcttggggctggggagagatggctcagtggttaagagacagtggatgctcttccacacggcccaggttcaattcccagcagacccatggtggctcacaagcatcaataactccagtgccaggggatctgatgcactttttctggtcttgggcactccccgcacatgatgtacaggtacacacatgcaggcaaaaccccacatacataaaatgaaaatttaaaagtcaaaaaaggaagaaaaaaacctctatagctcagaaggctgatgtaagaaaccagtctacaagaagatatgtcctttatgtgagtgagatgaaaagaacccattaaacaagtaagtcccatggacaggtgacctctagtcccaaatggtcctgactcctaactaccatgtagtttactcactccctcagccaacgtgtccctcagtgtgatattagtaacctagaaatcttatgcctggattgctgtgaggtacagttagctcagcagctttggtggcttatttctcactcatctccatggaactcttaatccttgggaacttggctatcagagcactcaagtcactgatagattgatgacttcactgtgcacacttgtgatactagagcatgctgtaccatcttgggagggcacaaagactgatgtgggtgtgtgcgcgcgcttgtgcacatacctgcgtgctgcttgcttttactgttggaaccctgagttttcattgtatagacagtcactatcagatgagtttatgtaagcagcagccatatgggccccagaccttgagataccaagcaggcttccctgggcagactcatggagtccgtgtctgcagtttgctgctataaagaaaacgtgttgtgtgtgttctcacttcacaagaaggacagtggatacctggcctaggttttcctgagcctgctgacatgtgccttattcctgctgtaatcatttttagctgttcatatgaactgccatctagctgagtaaatctgctgactcgctgttatgacatgaattatgttgcctctgtttcctgtgttggcatcctaactcacagtacctcacaagctgtatttgaatagagagtcttcctttgattccattacactttctttgacctttttaaaatctgtatttatgtggttgtttgagtgctcacatatggaggtccgtagacaacctcaggtgtcagaccaacctctacttttgtttgaggcaggggctctcgttcatatactccagggtacctggcctgagagcttccaaggattctcctatgctggggctcgatttgtacaccaggctgtctttggattcacaaacatccacctggttctatctcttgtgtgttgggattaaaagacacacaccaccatgaatgcccactatttgtttccttccttcctccctccctccctcccttccttccttctgtctgttttgtttttgttgttcttgttcttgatgagacagagtctgtcttatatagctctggctgtcctggaactcactatgtagaccaggcaggcctcaaattcacaaagctccacctgcctttgcctcggcagtgttgggaatacagacaggtactcccacagctggctgtcttttgatttttttttaagacaggctctcatgtatctcaggctggctttaaactcactatgtagaggagcatggccttgaaattctgaagccccctgcctccatctcacaagtgcttgggttgcaggagtgtagcaccacatgtgcagagttagaaccaaagtggcacaaagaacttttctcttagtggatattttctttatttacatttcaaatgttatcccctttcccggtttcccctccaaaaaccccctatcccctccccctgtttctatgagggtgctccccacccatccacctactccggcctccccattcctctacactggggcatcaagcctccacaggaccaagggcctctcctcccattgatggatcagaagatcagagcacttcaaagtctgccccaacacccccacagaagccctcattttattatggcagcgacttttgtcatcttcgagcttaaatgtatccagtcactgaactacatctcccaaacaccagctatgggccaacaactgttctaggtagtggagacaatgtcagcgagcagggtcaaccacaaactcatattggttcttcactcttgtggtgcttaggatgcacgataagtagaaatatgcatgtagccagcgtagcaggagaagagagggcaagggaaaaataaacccggagaaaggagactgcaaggcagaaagcaaagcaagcttggagcttgaaatatgatacccaaggtctgcattgtgaccctgaaacattctttcccactgctagcaatggggccccttggacaaatggctaattcaaggtcggggtcaagaagcatgcaagaagaacctggaacattttgttgcaccagaaggataagctaaaaacaacactcggctcattagtcattgttggaggttagaaaagcaatttacatcttgacatggcggtgtaggcctgtaattctaagaccgagaaggctaaggcaagagggctgtgaatgtgagaccagcctcagctaaggagcaagagcctgtctaaaagaaaggaaacagaaagaggtaggaagataggttcattagcagcgtaactgagttgtaaggcgtttgctcatcacctgaaaatcctgcggtttttgaacaacaacaacaacaacaaaaggtaccaaatctaggggctcgtgtgtgctataaaattgtgtatgctaaaaaagggttggaaaaaattattataataataaattattattgttgtgtgtctatgtgtacaggtgtgcacatgacacggaaagaatgtggaggggatagggggatgctagagcggtgaggcgggagtggatgagtgggtaagggagcaccctcacagaggcaaagggaaggaggaaagagggggatgggatagaagattgtggaggggtaacgggataacatttgaattgtaaacaaataaaatgattaattaaaaaagaatgtggaggggagaggacagcttgaaggactgagatctcacctttcaccgtgtgggccccaaggtgattctcaggtttgggagtaaatgcttttactcactgagccatctcactagcttgccacatccctttctttcctttcctttcctttcctttcctttcctttcctttcctttcctttcctttcctttcctttcctttcctcttctcttctcttctcttctcttctcttctcttctcttctcttctcttctcttctcttctcttctcttctcttcttttctcctcttttctgttttctttctttctttcttttagacagtcttgctctgcaaaccaaggtctgaaactcacaatgtagcccaggcttttctggaacttgtggaaatccccctgtctcagcctcacaaaatctgggattctaggtgtgaacctccacagagctgctcccctcaacttgaaggattattatctctgaaggattttgaattttaaaattataataatagacacatagcataacatttgccattagaaacattcaaaaatatacattccagcatgttttgattggtgtacaatcaacatccactctccagttctagaaggtttctatcctctcaactagactttagactcattagttactaattagttctttctactgctcaacttgcaatgcaggcaccattgtgtgtgcattcgtgcgtgcatgcatgtgtgcgtgcattcatgtgtgtgtgtgtgtgtgtgtgtgtgtgtgtgtgcttccttttattttgacagggactcactgcatagtttaaattggcctggagctccgtcttcttgtcttggcctcatcagttctggcttaaatcatagctgtctggcagtgggaagggttgatacatacgtacacatatgtacacattcatgtgagtgcacacgtgtgtgaggacagaggccaacataagatgtcttcctcatcgagtctccacattaatctttggaataagttctctcatcgaagctggagctcagctagtcagctagattggttgacctgccagtcctgggctttttcctgtctgtctctccggtgctggatttcagacatgcatagtagcacccagctttttacatgggctctgtagatgttaactacttatgcttgcatagcaagcactttacccactgagccatctccccagccctcttggtagttttgaagactgaataattttccactgtatagctagtttgtttcttcacccatcaatgggccctttgggcagctatgaataatcctactgaaaagagagggcagatttgaaaacatttgaaaatatgaaagcatactctcagcatgtgattgacatgtgattgacatgtggcaggggctcagaggaggtccagtgtgggtgcaggtagatgaaacggtgctcagtagaaggtggtacttgactgggtcctcgacagtgagtggccaggggcaaggactggacaagtttccttcagctagtgttttacttactgttactggctgtcttagggttttactgctgtgaacagacaccatgaccaaggcagctcttataaggacaacatttaattggggctgccttacagtttctgaggttcagtccattatagtcaaggcatggtgcagaaggagctgagagttctacatcttcatggaaggctactagcagaatactgactcccaggcagctaggaatagggtgtaaaatcctacacccacagtgacactcctactacaagaccacacctccaaatagtgccactccctgggaagagcatatacacaccatcacagtggcataaggacttcacatgcagatagacgtgggaggtgtccatcgcaccactcgagccaagagcaagaagaaggaacaggaggacagaagactgaactaagagacacaatgagcagacaagagagggcaagaagactcagtatgaactatttcctggaaagatcttattttccttcacaaccgggtttcattgaagagaccttagtttatgccatctttttcatgaggcattgcaaaagctgaagcaatcagggcaaggcatgggcaaacagaaatgtaaccccaaacgtttaggatgctgaagtagaagggtcacacatttaaggctgacctaggttacaaagtaagactccatttcagagaaaaaggcaaaaccaaccaaccaaccaaaacaaaacaaaacaaaacaaaacaaaagaaaacaaaaataataataaaaaaaacacaaaaggtacaaaaaattcaaaaaacaaaaaccaagatttggcacattcttcatggaatcccagcactagggatgctgaggcagaggttgggttggatggaggccctggctacgcaaacagttcaaagctagcctgaacttcatatcaagactctgtctttaaaacaaaaacaacaaaaaaaagagggattggagagacgtctcaggcttaagcacagtctgttctagcagaggactagagtctacatagagtggcccacaactgcctgtaatgccagcctctgtcgggggaatctgctgcctctagcctcggcagacacctgcattcatatgtattcatatgccttcagccacacaagcacatacacaaatacatcaattaaaaataaaaatcactctgaaactaaaataaaatattgaacaaatcaaagttccccaaatgccagtcttttaggatcagggagtaagggtgcctgctacgaagcccgaggagctgagttcgatttcctgagtgaatgatggaaggaggaaggagtacccccagatttcttctgtggcctccacaagtgccacatgcacacgcatgcacttgttcacacaatgtaaacaaaatgcaaccgaaaaaacaaacaaacaaggggttggacagatggctcaatagcacttattgctcttacagaggacctgggttttgttcccacctccaacatggtggctcacagacatcagaaactccagttcaaggggattcaatgccttcttctgacctcagcaggagccaggcatatacatggtgcacatatatatatgtgggtaaaaacagctataaaataaaataaaataatttttttttaaaaattgaaaagtccccaaaccccaaaacaaaactctttggcttttcgatttttactgacaatgaacagggatgatttcaaatctggacatttagaaggaatgtgttattattcttctgggtaatcttcacccagagattgtttttagtcgtccttatagtagcaaatcttttattacttgacaggcaccactgttccatctagcccttatgcagcaggaaagcaggtctggaaagaacaccttggttcctttccatatttggacccagaatggagcctaccacagaaagtgcttggtcggctacactacagctatgtatccctccactttcctgacctcagaaattaagcaagaccaacctgcttagtccttggacaggagagcatggcagttatgtttgttgaatgaacgaataaagtagttttgtttttgggtgtttgtttgtttgtttgtttgtttttcgagacagggtttctctgtatagccttggctgtcctggaattcactttgtagaccaggctggccttgaactcagaaatctgcctgcctctgcctcccaagtgctgggattaaaggtgtgggccaccactgccgggctataaagtagtttttaaaagaagtctaaaccacattgtagcaactgacagagacagtggagttgaccacagggcagcttctgtctggggactcagtttctccctttcccccattttcccctctctcgttcctaaccctctctctgctttctctccctccctctcgaatctctactctctatcattgccactgtcctctgtgccatttgtctttctgtcctatggtggtgagcaagatagaccactttgtcaaatcttcattctataaaagaggaaactgaggcaagaattcagagatgagaaggaggactctgctagatacaattctacaggtaaaaactgccccccaaaagagagattctctgattcagtatttaatggacagatacaaatctaaagacaggcatggtgatttgggcctttaatcccagcactgggaggcagaggcagggggatctctgaattcgaggccagcctggtttaaatagcaagttcaagactagccagagctacattgtgagatcctgtttcaaaatcctcaaaacagcacaactaccaccaccaccaccactaccaccacctattcgtagcaagtacactgactagctaggctacggtcacatgaactgattctaggccaatcaatagaaaaaggaaaaggtgttaggattgtctgctggagtcctgtgggagaggcttggctatttactatgactgacagtttttccagagtctcatgattatgatcggggagggatatattatgaaggcaaagagccccttcccaaactgttacaagacctggaggctagagccttggcagcagtaacagatggaaagccaaatgtctggagttgggggcctgaattctcccctcgggatgaagctggcctggtaggagctggagaagcccaagacaaatacaaaagttggaaatggtctttgagagcctagctgctttttttttctttttaatctgcccttctttgaatagagaaactgctgtaaatttatctctcactactgaatcaagtctgcattctgggaattcgtgccatcgttttctgggggcattttgcactccccactccccaagatacagttccaccctcagggtatagcccagcccgaatttggaaactggatttgtccttgacaggttcctccagacgctcctgactgctctgtgacagaagccatctgttcctgcctctgcctgtgcccctgtcatcttcctctgcttgaaattcactccctcattttctctggcccttccagccccacccacctttgaaggtgttcctcaagtcccacatgcctcccactgtcttctaaagtcacccctgtctgtcctttaggtccagtgtattatagtagaaaaaggcctgtagatcaagactcaagttggccaccagttctttgcaagacttagctgggagttatttcctctccctgcaactgcatttcctcttctgagcaccgagggaggactggtttgttagaaagggaaaccctccccccttctgcaccacccccactccgggggccgcttggcatcctcccaactaagaggcatgctgtctccatccgccacattctaggatattctgattcggaaatgcaagtctccactttagtccactgctaaatgagagagcctggagctcagtgattaaattgatggagttattactttctccgccccagaggtgagacttcccatttcaggaagggtcccaccttggctcttctcccttttcataatccttgcctagcaaggaccagagtgaggtttatgtggaaggaggtcgctttcatcattcagggtagaaggaagttttctgtgagattgggcctggcatggaagaaggtcacaagaccctgcctatttctgctttcaaccatacagagcaagggatttgtgcatccaaagtctctctggctccggttcatcttaactcccacttctctcctatcctcccttcccaggaaaaatgtttctaactaaatgtggcagagtcaaatgtttatgaaaaacccattgccaaggatatgtctggctgtgtggttgctctaaagcagacgggtggggcgtgaggctctgtgggatgaatgatctcccagtacctttgtgaatgactgcatctctcccactgcactaggtctgcttgagggaatatacggattttgctacagtgctttagctcttgggggagagttttcctggagtgtttataaatggctcagagtggactctagctcctcttctaatgtgtcaaatctgagaaacattaataaagcctttaggaggggatagcaagatggctcagtgggtaatggagcttgccccttagctaagggacctgagttcaatcccaggaatctacatggtggaaggaggaaactgactcccacacgtcctgtgatgtccacaagtgagtcagagtgcacatagccctccacctcacatacccacaaatgccaataaaatggcacaacagtaacaaaatcccaagaaaccaaaaatactcctgagaggaaccagtcaaaccatggttgtactaagtccccagatatagttccatctctcttactaagaaagaagagggaaagctgaactgggaggtctcctgtactcaaaggaacatccagggatttagatggatggacagtagatggggaactacagccagttgctggcatctgtcattcatgagtgggccttctggaaggtctttccctggctcaggcatttcccaaactagccagtgtgtcttgaggccaggagcaatcatccaagtgccaccttcctgaattgctcctgggagaaaataagcccctttcaactctctctgtgtttagagtgtttgattagataagagccatcggtctgcttagcagtcactggtattactctgtgtggacccagaggtttgagagaggctctcactacagagtgagagcaaacaccctcccccagctcctggagctctgattacaaggcttgagctaccacacctggccgttacagttgtgtttttattttatttctttcttttagtgtgtgatgtttgtgtgtgtaaatgtgtttttatacttggacatgtgtgtgaatgcatagaggccaggagtcaacctcagatatcattccgcaagagatccccaccttggttttttgagacaaggtctctcactgggacctggggctccccaattcagttagattcctaaggatctacctcccgaaaactcaaatataattatcagtttttaaaaagtgtatttgagtcttttgcgcacatgtacgtatgaagggcagaccttatggtggtcctgtaggcttttcctagacaagttggaaagtgtggtctaggccaaccactgcctgcatagaaatctttctctatacatgggtcagggtttcacgattaaaaaaaaaaaaaaatcagtgtaaagccaagtatgtggcacttgccattaattccagcactctgggaggcagaggcaggcaactagttctctatgagagtgaggccagcctcactatatactgaggctatagccacagttaattacattaggtgaccttgtttcaagtcccaccccaccctccaaaatcaatgtagactctagtactaaaataaaataagtttattcttttgctataaaagaaaaacattttgtttacacaataattggtaaaaaaaaacaataaaaatataaagacaacaataaacatcacctgtaataccagagacataagttctgttcaagttttgtcatgtttcttcctagtcttccccccatatattgatacaaaattatgcatgcaaaatgttcccaatacgcttatgttatgtattcaggaacatactgcaaaaataattctgtatctgattcctattataaaaacaaaccataaacaactatggttagacttgcagcttctttcttccaaccttttgcctgtgtattgacacaaagctatttatgcaaaatgttcccaatataattatagcacatattaggaacacatcgcaaaaacagctcagtatctctctttggtcactggtggtgctacagcttggaggtgactgtccatatgatggatgcagaaccatgaatgcaaagcatccccaatatactcatagtacatattaggaacacatcgcaaaaatagttcagcatcttggtttgcctttctccttcctctatcattcaaccacagcatcagtccccagcatatttgttcaataacattaaagcacaactcaggataactataatattttgatctgttctcttagccttatatctgtatattgatcccatgtatgtaaaattaaaacggagaagaaaatattttgcatgtttatcattaaacgctttttattagtgtttgtggcacatctttatgtcacaaaaattattttcagaaatatcaatcttaatgatagcatcctatcacattgtcttagaagagcatattttatttatgcaaccctttactattaataagtcattttatcctcaaaatgactgaagtgaagggaggtggtaaccccagtgacatagatggtgaggcaaatgagccacagatgcagattcctcctggcaggcctagagagtgatttaaagccagcatgagcaagttagtgaggcctagtctcaaaaaaaaaaaaaaaaaaaagaattgcaagcaggtatgatggcatacacttataatgccagcccttgggagggggaattaggaggggaaggaattcaacatgagcctctgctacacaagtttgagtctgggtaacataagatcttgcctcaaaaataaataaataaataaataaatagtaataaacatcctgatgttttttcattttccgtgactttccgtggcttgtatatttatcttcatggctatttatatgactccacatttttaaggtaacctgtttttctaaagcttacagctaatgtttttcttgtttgaggaaaaacatagttttaatattttagcctatatataaaaccatatgtcctgtctaggcttcagtggactgaatagaaatgcaaattaataaaacccttctcattctataaaaacacaacccataccctcccccactccatggcaacccctttcctccttgcctagggctcagtcctctcctgacctctcatctctgtaatactcaccccaccaattcttaggaagaggagtggctcccagacctttcagttatcaatctgtcacaagggcacagtggtatctcgtgacatgatgatccccgagacgtctgagatccctgcatgtgtaacctcaaatttctggatctcccagtacccttaaagaccttttagcgagtagcatttcacaatgggacacaaatcaaagcacaacaaaacaaagaaacagcaaaactgtgaagatggggaaaaaaaaacaaaacaaataagcagctaaccaacctactacaaattctgtttttaaaaagtctctttgttttgcagtttctttccagtttctactctactttcagccaccagagttagtgtaattctgtggccttgatttttaaaagcttgttatcttaagaatgtttctaagtttctaggtagtttttatgattattcacaatgactaaaaacgttcttttgaggatgccactaaattaatctctatggttagttcatatttgctcccttaatttacttgagtctatagaaaggatcaaagctttaaagtgaattcactttacaatttttaagcttgtacacattgaatcatgcatgggtaggtgacttacagtcattacttaatcatgaagtcaatcttgagcctcagttaggaagtgtccagcagttagactctcactcgtccttcttaggactagacagtttcaactagaccttttctaaccaaacacactagttcagctccattttctgtcctaatcactatggtgtaagcttctgatggccaggcaggaatgttacctggcacagcatgaagtctgcatgatgcagtttcccaggtttcatcttcagaatcctcaggtctctcgaaactttgtctgccttacttatctctcaaagttgtaaacaacaaatctatgaaagcagttggggccgtaagtgaacagaggaaatgaaggcaagtgctgagatgaggattgtaaagatttggtttctagggcacaaacattctgccttcactctgcagagtggaggtgggggaggggtagcaaaagacccgaaggaaggagtcaggctgcaaagcaagcagtattcccagcccccaacaatgcccccgacttggagctggggaggggagcgggagggggggagtgcggcggagggggcgggaggggggcacgcttttcaattttcaccacttgctccgaagacagagctcaagagtaaaggggagtgctccaaggctgagggaccacaggaaatggaaatcgttagaggctcctcccacaaggctctaagcccctttaaacttgaggaggatatcaattgtggacccagtgcaggaaacagatgagtgaaatattaggacagagccaggagatcctagctcaatggatgggcataaggcaggctgaactgggcctcggagatacagatttgctatgattggtgtatacatactgtgtttcgttttaagaggcatacaataactctacataaagatgaacgtataagtttctggcatcatgagaaatgcttctggacaacgggaaaatagatctctagaaattaatgttaacttggtaatgcccacagctcaagtcttttgatctctatcaatatatattcattgatcttcctgaagcatactttttgaacctatttgtattttttttttaatctgcaccgtctctcaggaaatctgcctattaattaatttatgtcgtgtagattcatcatgtttcccttgctgttccctcctcctcaatggattgacaggtatggtgctttagaataatcagtaaaataatgggcattgcagagtccttcttgggtgtttgtttaattggacagttgcccatgttactggacatcaaaagcaacacagaattatttggtctcccagcactggagtgtatccaaatgttttcctgtttaggattcaacttttctccttgtctgcgtgcatgcataaatgctttacacaattacatttgctgactttttctgtggccctggttattggcatctagtttttccaagtaacattgacacacatctgttcaaatcaattgacgcttctatcaggactgactcatttggtggaaaaaacaagtttacatgccaactggaacaaaggagcctagatttgggggaatagcaggaaaaatgaaaacggtggggccggattatttgacttacagatcataaaacactttccaataacattttaaaaaggtatacaatattacactagtgactggttatatactgtacccccctagttgggtggttttcaatatctagtgtggtaaaacgcatataaattacagtttttgaaagatgattgtactttcttggaacaggagtcttctgtgtccacatccccaagattgttgatgtagtgttcccttgttggaaaaccaaaccaaaccaaaccaatatggctagcagaagatgccttcagaagtattcctgttattaaaattgttacaaaattatgttcaattctagtgtatcacaataacctgaatatcttgtcctacaacttacagaaatgtcagagtttagatttagagccaggctaagcttttcatagttttaagagccatgtctgtctagtaaccttttacaatgccacgtgcacacagcttcctcactaacaaataacatgtgttgggggaaaaaaaacggagaaaacaatggagaggtgcctctttgaatgtggtaatggaggatcaattaatcagccgaccataaattgaatcactttatacaagtctcccacacattatcatgcacatttagcaatgtttgaaaaacaatttaaaagaataccttagggagttgttaaagggaatttataatctggaacgaattgccatcttcttaattgacatagaagtgtttggctaaaatattgctttattcacattttgcccttggaagaaaatcgaagcacatcataacttcgactaggcaaataaaggtgcgaagagcatttcaaatcaaaaaagggcaccacgcagccaggtgctatgtggatgagctcaattttggcgcccttgggcaccttgggctaatggcatcttagattcttagtcagtggccttaaacctggatcatttgctcctctgctctaaagtccccaacccacctgaatctcacttgaatcttgcaggcacccactggaagcagccagatggcgcaggccagattcttctgggtgagtgggggccttcagtgagccccggcgctcttcctctggcataaggcaaagccctgttgaacagtggagatggagaagggaagttggtgagggagaataggaagtctcaaagtgcccctcctccaaccctgcgcataggaacgcggggcgcctgaacctgttagccatttgtcttggggattccgggccagaggggccctgccaaggggaggggtgaggcaggagctggggggcgtggcttcaagaagccaaggagatgggggcaaggcgtggcttaagttccaaggggtttcagtgctcctgggagccagggggtccttgggggcccaacgggacccaaaccacctcccacaccttgttcaaacgcaaaggagtctgggagaaaggcatttggtggctagagctagactcccaggctcacaaggcctcctctaactgtaccttttatgggggcctgcacccagtccctggggaagatgacaagcagttcatacagaccagaagggtgtgtgtacatgtattttatttctttttaataagacaaagcagcacgatttcacccacactccgttttccaacagtcctttacatgcctatactccagattatggaaagtgattttcacaggaaaagtacagtcttgctccagaagtttaacactcttctccagttcccaggcgcctcttgacctgtttttttttttcactccaggctcaaagggctcctcagggaaacggaggtgccatgattaatcacagcagagtttgggatgtcacaaagcagccattttctcagagacttctaggcagtgacaagggtgtccccatgtccccactgccatgtagaattgtgtgatgactttgggaaagggggataaatggggactagaaatgcagagcctcactgaggcttcctgttgggccattgcctctcattgtaccacctgggggtccgcaccagcaagacacgaagagatccagggacactcccacggaccccttaatctttcctaaactgcaaagagaaatggggactttctcaagtcatccttcctgcccttcagaacccttcttattccttttggaaggaccccttctccattttgttgttgaggacttaggacaaattttcttgtttcgctcttgtgggtggtatactacttgatgaccaggaagtgctttttttttttcccagttgattcacttttacctgagcagcaagtgaggcgctaacaacacactttcagtcacacccagtcagagtcacagatcagcaactctagttgggagctgttctagagtctccctcccatggggcctatgctgcaggctaaccgaaacttacctggtgggtgtgcccatgtggaagacccagacttacccaggcagtggaaacaatactccagggcaccaaacactcactgcagtactgttcccgctgctagggcacgactgagtgggatgggctgagtacaggatgccttgtcccttcttcaagtgaattgccaccttgctattcacacccacccaggcccttggactgtgtagagtgaccctcactagactaagcccctgccctcccacctacctgctttagggcttttagtagaacccacacaggtctgttcagcaggtccccaccttctacattccccacgaaggggtgttgcagcgcttcatgttttgaaccttggcaatactccaaaacatgaattgctgctgcagcccttcggagtcaacgagggtgggggccgctctggggtacctgcgaaggaagaaagtctctgtgatttccaggatctgctggtgaggcaaagggtgtactgttggaaagcagggtgtggtggatagtggggaggaggagactcttacctcagaaagtagatgaaaagtgggattaaataaactgagacaatttggtaacatctggatcactcttgccagctccaaagtcttggtgaaacttcctgctaccttgtataagtctcatttattgtccccgggttttgatcatttattggaaattggtgcaaggaacttttgataatcaaaaaaaaatccctctgggtagtcccagttggttttactgaatactataggcatggaatagacttgtctagtagtttcctccgttcttacagtaatcacctcgtcattagttatttttaaggacaaagcatgagaatgttctagatgaaacatacattcctggatgttctcatacattgctggctactcaagcttatttataaagacatttgttaccatcgacatcaaatcacaaatcaagaactttaaataaatgacatccttaaatacttgatgttaaatacaaatcactccttcttaagccacgccactgaaaatcttgtcttgaaatggccggcactgtgcgctctcctcagctcccactgttgcttttcaaaatggacacacatgagcaacaagttacattcatttccttgtttaaacaaagcattcaggaaagcacaaaaaccatcctttagtccttaaccacaaacctaataactaaaacaacaaaactacagtgcctttgaaagcaaaaaacattctgtatacaaatttcctgtattctcatttaaaattatgtccgtttttcgaaactagtacaatgaatgctgggtccttttaattaattaataaaatatacagagtatgtaattaaactaaatacaaaattcctaacataacagataatgatccagtgctaacatatgcattgcttaggtcatgataaataaagccattaataataacagccccactccttaagttggaatgaaaattccgtcttttcttggctatattacaagtcatttttacatggacacggaattgtggaggaaaaaaccatcgatggtcacctttaaaaagaggagagagaaaagccgtgtttagtaaagatacaattatactttaaagatacgtatttttctcccaatttaactttatgtcccacacaaatgtcacatcagagattgcaattcctcttaatttaacatttccttagttgactactcataaaaacaaaattcattcgagataacatcatcaaaaacgaaggtcttactagataattttgttaacgaatacactggaatcaaattcatctctagattatccttcatccatttcttttcttcccatcactctacaacgacttatatccttaaaaagccatctcactccctgggtttgtgtatttccccttgggcttaactttacttacgaaaagagagcacaaagagatgtctggtcacttctagagagggtcattcgctgatacaatagacaaagaatcaatactttagggttaccatggccccacccacttcagaaccacgacgggtcaaaatggccccacccacttcagaactgcgaagggtttggccaaatgatttaagagccaaagactaagcctcttcctctcttcccagttgagaacgttttgtcttttaatgttgcagatgccatgcgcccccacacccaaaacatgatgcacaggtcctccgcaccttccagccaaacttttccaatactggaaaaaaaaaaaaaacaactaaacaaccttgaaaagttttaattagcgagagacaatggaaaacgaattttacggttctttccaggacattctttactgcttacaaatgagtggcccaaagtcccatttacagtctgtcaaaactagttgctccccaccctggcaaggctgacagcctgaggctgcccgcccctcactcatttctctctccccacccctccccgtttactcttctcagtccactttctgagaagttccctggccacactcacttgctagacattttaaagatctgtcctccccccaccacgacccccggacacgctttccacccccacaccccacccagcgcgacgcataacatttttttgagaattatccccgtatctgttacagtctgtagtgaccagagacatagttgggggcggggggaggcgggccaaaaagttcccttccccctcgtttttttcttttttagattctaagtcacctctcactccactcgaaaatggcgccgaaatcgtagaacttcttaaatttcattgtaagctttttgcaaaggtttctgggattttcctgcgaagctgctcctcagcgtcgacctagaaaacaagccggggaagctagagagaggaaggaaaaggcgggcggggaggcggacagacagacggacagcgagagagaaagggcggaggggtgtggcgaggttgtgaggttagaagagcgagtcgcggagacttgggagggcgcgaggtggcggtggtgcgggacatcgagggacagagggacggacagccggggaaccggggttcgcggggcgaggggctcacagagaggcgtggcggagaagaaccggagccgggacggagctgggctggaaccgggctggaatcgggctggaaccgggctggaatcgggctggaatccggctggaatcgggttggagcggtgctggagccggcggagctggcggagttgggctggagccgagcgcaccccaagaggcgagcgggagcagccagcgcccagtggtccgcagcagccctagaaaaagccggcccggggggcgtggccatgcgctgctccgcgccccgcccaaccattcgcccgctcgctcggaggccccggagcggaaggggggaggggggaggccgtgcggacacgcagagccacagccttggcctgcagccaggaagggccgggaaggacacggggagcctggagtggccacgtacagagagcctcatagccgcgggtgcaggagacaaaaaccagggagaaaggggaaaggggaaaagcgggaagggaagcaaccaagctccagctcaaagacccatgccacaaatgacactctaaagtcactagggcccaagtctttggggctaccaggagggtacagggcggctaagccaagcctcttaggactatttttcttgggggtgcctgaaacaggatgaggaaacaagggaccctcagattgcagaagggaagtgctaggcgcgcgagtgtgcccaggctctgttgagtcttctgtgctctggcctctctgccaaactctccctcaggtagaggactcccttaggtcctggcggtccactttaggggtgggcatgacactgaggcagggaacgacagtttacttatacatgtccagtccaagaaggaaagtctttactacttaagttttgagtctggagtagggaaagaaagggagtctttcttctgtatgctggatatctttagggacggcgctgtttaccagggaggtatgagaacggtgttgaagttaatagcagggtgtccagggtgacaagaactgtgcctaagtgtaaagagatgaagtataagagtgattatgattttcaaatgatgccgctgacccagacaggcactcagagagaagggggaacgggaatggatttcaaggagctaacatgaggttgcatctgggtggggagtcaatagtctttcattgcaccgcgttcgcaactttcttgtatatttgcaaaacgtcacaataacacaaagctggaaaaaccaggcatggtagcacatggaccagtagagtccagcactcggaggaggcaggagaaacagaagtttaagggcgtccttggctacatagcaagttcgaggacagtctgagctttgtgaaagactcaaaaaaaaaaaaaaatctgggagaaatcccttataaaatagagcctggatgttaaaaaataaataaataaactcagcgtctctcttcccacctttcttgggttgcagacatctttgagagagtgggatgtaaactcagataggatttggacgggaagggtttcgctggcctgcagcagcttacacacccgggctccaaaagagaccacaggggcaggtggagtgctgggtacaaggcgctatgtgggagctacttagcgcgttcactccgtgactctgaaggagaggctgttgccttagcagctcttggctaaacctctactccagccacctcttgtctagtctgggacttagtgggttccttggcgcccttgactagcgaggacatctgggcgtctgcgaatatccagcagttgagcagcacgctggtagctgcggtgcagccgcggggtcctccatgctcccagagtcaagcctaagttttatttcagagggtagaaggcgtgcgggatagtttggaacctcaggagggagcggggacaactacaacaaaacccaccaggtgtcaagaaaaaaaaaggggggggggcaattgcaaaacgggtaacacatgcgaaaacggcaggcagatactaaaatcacggattctgaattccgcggtgctcagcgctgcagtttcttgcgctactcaactctcgctgtatttctatatttttactgtgatacttcttcgaggttgatctcataatcgtgagttttgcgaaaatgatcgcaaagtttcaaggctttgctacaatcgtgtgaccttaggctgatgactggggcttattttcgttgtttttgttttgttttgtttttctttctgggtttggagggtgagaagacaggagggtagagtctttcaggatctgtaaaactgtggggagaaattagccaaaaagatttttacagaacaagattttcttttcaggaaagagctctctctctctctctctctctctctctctctctctctctctctctctctctgttctacggataatttcagatagtttcagtgtgcacttaaaactattattaggacctacaatttttctattaatatcttcacaacactttgtggaccagactgaaagtttgccgaccagccaggcgtgactgaccacgcggcgactaaatcctcggctagatcattcatagagctccagtgtccttgggctgcgatgctttctttgggtttttaaggttcagcctggtgggtcagtttgtttggattcctgcacataaacattaattttcctacataaataccagaagattccagcgctgggagatgaaagatgaatttgtgacaggtcttctgaagaaaaatggcaagggctttctttattaaactccctttgctacatcagcatattaagagagccagctgaatattgatgaattctttgaggctgagtaatatggctacaggcccaagaaagctaggggggcaggcttaagtatttactcaagtgaacaatcttcaaatattttttcaaagatggcgtcttaaggattttcttagaacatctgtagtaagccctgttctgcaaatgccttctcacatattaggcccttcttgcctgcccgagataaaaatctaaaaatcgccctaaaaaagtggcctgaaggtcaccttgggattaaaaagggggacacagctcactaaccagaatgctaaggagcttccaacaggggagtcaggcatttctcactgggcaactaggaaccagaaagaaaaagcacggcctgtaatcccttctccctcctaaaatactggtttaaagcaattattttctgaaaaacatgtaagtttttctatctacccccccccagtaacagtcagaaattaccttgataaataactgtagctattgagggaggagagggtgtagcagcagtttgaagggtcttgggtgcagctgtgaaaaataaatcacccttaaactgaaacattcgatttgagatactacgcgcaacaaggcatttggaataatttgggagggggggggaatacctttttggaaacaatttttgacttggtctttggaaacagatattaggaaatcaagttgagctgtttttttttaattacaaggaaaaattctagacgttgggatttttaattttaagtaggaatgctttttgataataagtggtttttaagtgtgcatgtgtgtaaaagccttgagttagagagacagaactttctttaggctgcaagtatccagacgtcttcagaatgataaaagcctggagatgattacagatttaacaggaagagaacaactggaagcttctactgcattatctgtaaagagtctcaacgcccagagttcaatccaaggctaaaaagtacagtaagctaaataactatccgattaaactaaaatggtaaattctatcttactttctaaactcacttatgcatgttttaaataaaattcctggaaaaccttagaaattgaaaggaattcttgaatctgcctctctcctaccaaccaggctctcaccagagaaaccattttgcctctctaccaagaagagccttagaaactcattgatgctcacggtttttgatctcaagatttctttttccctttccaaagatgcgcatgctcactgcctgcaatagctatgtcctcttactatcttaagaatgtctgcccattaaactgaaaacaatttcagattccagaagtgattgatcgatcttcacaagaaccaggcccacagtggagggacatcttagtgttcctgtgtgactgccctagctgtggttggaatttgatctctagtcaggggcaactgacaaagtttaagaagaggcacttggagatagtaaacctgtggccatataagcggaggcatttagtttcaaactcgacacttcttccattttcctggaatctcatctaattaggaaaaagagaaggaagaaaaaacactctactatctatcaatgtcaccctgccaaatgtgttcagggaggcagaagtgagtttggacagttggctggttgctccatttatattaaaaaaaagtcaaaggaaaagaaaaccccaacaaattctaaacaatacaacaacctcaaatgaacaagctgatagacagagtgactgactcaaggaagtcctgaaatcctgttaaaagtgcagtgttctggaaagagtgaatgacatcattttctgcgtctggtctgttggaatcacactcctggggcaaattttatcttactgagtagagggaagaagagggaccgggaacaggaagtggaaggctcctgaaggatgttatctctgtttaaaactaagacacagatgcctgtttttcaaagcctgccttactttgttgcatcagaagaggggaactatttccttgtgctgatagcacagaattttccagaatcgactcagagttcttgttctttctccataacgttaaatgttggcattaaaaaaataaataaaaaagacagggtatggtggcttttgtcttctggagtgcttttttctagcactccagaagctaaggcaaaggttaaggccagcgtggattacatgaaaccctgtctaaaataacataaaataaaatagaataaataaaacaagtaagattgatagggtttctaggtcgattggagtatgtcatttcttttacttcctgtctctaaaatgattcctttttaaagcagtgtccaggatcaaacataggcccgtgtgcttaggcaagcattctgctacagagctacagctacagtgacagctcttaaaataattactggggttacaattggggttagactctgcagttgtccgtggccaaagtaaaacccatctattggtatgagaaaaaaaaatagagatctggatttctgtttttagacaaggtctcatgtaggcgaggctagccccaaactcctgatggtcctgcctcaccttcccaagtgtaccactgcacccagcttagaagctgttttacatttttagtgcttgctctaaacccagaacccaggcttcttttgatcaaggcccccaggaagacagagtgctaggtcagcaagagggaaggaaggggtcatcacaagagaaagaaagaaggcaagaatatgaaaatcatgacctccctgctaatgtccttccactggttcactacaatgaatgtttcagactgtctggatatctttcaactggattctgcccctctttcagtaggtcttagtgcttcttggaaaacacaattttttaaaagaaaattcacatagctttaaagcttcactatggaatgtggcactcaaggccctccttaagcagctgcaaccaactcctgtgggcacacttcctacctttcagcagcacccacttccatgctgggacactaactgtgcctgttctttctggatgctttcctgagtgtcttttatcctccattttcacggcacttgatcaaactataatggactttcttagcagacaaaaaggtcctagagggtcaggacatgtttcaatatcgttattgttccacactttgagcagtaacttgtctcagttggtgttctatactcatttcttcaatgagtgcatttctgagaagagcaaagagtgtgttggtgctaaaaataatggttagtatcattagtgcctttggtagaaagtgttagttttttttttttaagatttattttattttcatgagtacactgttacacccttcagacacaccagaagagggcactgcatcccattagagatggttgtgagccgccatgtagttgctgggaattgaatttaggacccgcagaagagcagtcagtgctcttaatcactgagccatctctccagccccaactgttaggtgtttaacccaggtctaccgcattggcataaccagcagtccatctgggactgacatttggagcatagtcaccaaaaaataatgtggaattagtttttagattagattttcttcttaaaacccatcactatgctttgtacttgtaagtttgaagctgactcttgtagggtcatagggatttggatgaaatggggggacacttctcagagtcccagtagtggaagagatctaaaaggagatcgccttggtttgatgaggactgctggggagagatctgcatttggggaggttacactgggaggagaaggagacatgtttttggacacagtctcatgtaacctaggttggcactggcctcaattttgttttgtaggtgaggatgatcttggacttttgattcttctggctctgtctccagagagctgggattgtaagtctgcatcaccacacccgttttatgcagtgctgaggatcaaccccagagctctgagtatgctatgtgagcactggaattacatccctagttttcaaagaggaggtttggctttagtcaaagatagtataggggctttaaagggccttgtgttaaaaccagtgtttttaacagattcacctaactgaaatggtaaccctgtagcatacaaattttgtaaaagccacacccatctttatgtagaatattccagtctccattgtacacaagtaaaattgttatttgggaggaggaaaaaggagaaaaagatatgccgtgctgaatctacgtcagaagatacgtcaccttcctccatgtcatatgatttgtcagcttgacaggatctccagtcacaagcccagcagcaaggccaagaggaattatgtagatgaggtcatcctctgagcatttctgagaggggttatctagataggttaattggagtgggaagacctatcttaactgtgtgaagaaccatgctatgggcttggggcttagactgaagataaaggaacatcctctctgtgggtctgatgggaatagcagcctcaagatcctgtaaccatgtggcttacttccttgaaatgacaagaactgtaacctcgaaccgtgagctaaaccctttctgtctttaatgttttttttttaatttatgtgtattggatagcatatgtgcataggtgtcttcagaaaccagaaaacgtgttgggtctcctgaagctgaacttccaggtgaatgtgagcacccaatatgggtgctaggaaccagattcaggctttccagaagagcagtccttggcctgaatcactgagtcatctctccagcctactctggctttgagttgctctcctcagggcattagatcatagcaacagaaaaaaataactaaggtaactgtccccatttcctcttcctttgtcttctttctaacacttccctctcccctagctgtgaacaccagaagtcttaactagtcctgacttgttttttcattgacttttaaagttaatggctgccaggcagtggtggcacacgcctttaatcccagcacttgggaggcagaggcaggcggatttctgagttcgaggacagcttggtttacagagtgagttccaggacagccagggctacacagagaaaccctgtgtcgaaaaaacaaaacaaaacaaaaaacaaccccccccaaaagaaaccaaagttaatggctaagcttatcaataggtatgttttataacaacagtagatgttaagtcaaaagaaaaaagaaagaaggaaaagaaaaagaaaaggaactgctccacaacctaggatctgactggttttggtggtaacatggcctctaaatggagagtgttctctttcacgggcagtttgaaaatattgtcatcaaatattttcatgaagttaaaacaacatcgaaagtaactcgggcagcctggatctcccgcacacttggtctataacctgaataacctcccttcttcagtgtgtgggagcatcttttatcattggaggaggatttttcacaagtgctccatcactgagctaaatccccaaccccagagattactttattttgacttggagaccataaattattccagggtgttggtgtaggaatgatgtggaagcttactgctacatcaatttgttcttaaactactgaccttcttttgcttgtggggtgggcctgcaccctgggtttccttgtgttctgtcatgtaaatgaatcttagaaaaaagatggggctagtgaggtggcacagaaggtaaagatagtgaggtggcagagaaggtaaagactcttgccaccaacctgaagacccaagtttcatctctctgacccaccagacaggacagaagcggttctgcagagttcccctgtgacctctaaatatgtatcaaggcccactagaagccacgtatacaaagaaattaaaaacaaattgtaatttttaaaagaactatttattttatgtatgggtacattgttactgtcttcagacacaccagaagagggcatcagctctcattacagatggttgtgagccatcatgtagttgctgagaattgaactcaggacctctggagagcagtcagtgctcttaactgctgaaccatctctccagcccaatattttttaatttaaaaagaaaaattgactatttgatggacatcacttggaaaattattggttttttttttaaagactggatttcatattctaggctaggtggatatgagggtaaaggtgcttgctatcaagcatgaggactttattatgtttcccagaacctgcatggtggaagaagaagagaagtgacttcacaacattgtcttctgacctccattttcatgctgtggtacatacactaaaaatgtaataaaaagaacttatatattaaaattaatatgtttgcccttagtatgcatatatatatgtgtgtgtgtgtgtgtatttatatgtatgtgtgtacgtactttactcaatgaaaaaatatagtttaaccaaagaataaataaattggcaatatttttaaaatgtggtttgttgttttaggaaaacaacagcgaggagagtgttttttgtggtgctaagagactgaagccagggccttgcacatgctacgtgtgcactgtactagcaagctgcatcctcagcccaagagtaaaacaagtggacattactctcagtctccttttatggctgaaacatctcattacagctctaattcttaagtatctgacaagcaattatcctaacaaatgctgcagaccttttggcttttctagaaattgaaaggtgaacacgctcatttcctttgatggcaacaaagcatttcttactattattgcaaacattctgaacactatgatatggaggtttataaaccttgtcaccttgagaattaactgagcattaccacaataaagaaggaaaagattcttttggagtggtgtatcacaagctaattaaattactcaacagacagctcaggggtgaagggttggagacatgactcaggattaagatcggtttttgctcttccagagctatgtctcagcctttattactgatttaaaacattgcttaattatactgggatgtcaagttatgtaaaatatggttactgatcagtatttcttcataaacattcatttcttttaatgttttagaatttcgtgcatgtttatagtaatttttttaaaaatcaaatctactcctcctgcctccttctgaagtctcccatacctcttcatcacttttcacttccaagttcatatattctttttttaacccgatgccattgtgtgtgtgtgtgtgtatgtgtgtgtgtgtgtgttttgggaggtagggccatcctcctgagcatgggggctattgcactcacaactcacattagctttggatggatgcataagaatcccctccccccacaagatcaagccagctaaaattccagcatgcatttgggagggtctcaccaagtcccatttatagctgtggagctattggcagttgatagcttctgggaacaggacagtcagttctcttttcattctctctgcctaaaatgtccttctccttcatcttaattcaatgaaacaaactttcatttcagaacctcctcaattattcccaattgcatgaattctaggcttactccatcttgatttatctgttgctctggcaactagatctgatctgtctgtcttcccaatcttgccacacatcattttttggtcacatatgtcttctttgatgttcttcttacccttgttattgttttccaccatcatctgtccctttgccctgcctccactgggttgaaataaactcctggcattttctcctatgacctcagtcctggtcctcatatctttgtgcaaacccatcctatgggcttttaatagcctttatagcctctaactccataggtaactttacatggtttatcacatcaaactgtgttggctcttgtcagccattaaattcccaacatctaacgtagtgattgacccctcagataattgtaatagatatttgttgcattcctacctaccctccagggattgcaacctgtcagtttatcaaaaagggaaaaactgagatgaatctctgtttctttaactcccatagttgaatttcttttcttggtgatggccctctaaatctttattcatctggtaaaagtacttcacctttattaatgagaaaaattgtgcttctatattgcattcttgtttttagttaaagatttattttaacgtatttaattatgtgtacgtgtgtaggtctgtctgtgggtgggcaagtgtgtgcaggcaccaacaagagccagaggctttggaactcctggaactcaagtgaagagatggctgttgcctgatgtggatgacggaaaagtgaatttggtcctttggaggagcagcaaatgctttcaatggctgagtcgtctctcttccataccacatttttctttaaaaattaacttctactgacaaataagaatattatgcttgtgatatacagaataagaatgttatgcttatgatatacaatatgatattttgaagagtttgcttcttactaggtatatggccgtgaactgctttctttctttctttctttctttctttctttctttctttctttctttctttctttctttctttctttctttctttcttttcttcttctttctttctttctttctttctttctttctttctttctttctttctttctttcttttttttttttgagacagggtttctccgtatagccctggctgtcctggaactcactttgtagaccaggctggcctcaaactcagaaatctgcctgcctctgcctcccaagtgctgggattaaaggtgtgcgccaccactcctggcatgaactgctttctttttttttttttattacgtattttcctcaactacatttccaatgctatcccaaatgtcccctataccccccccccactcccttacccacccactcccactttttggccctggcgttcccctgtactgaggcatataaagtttgcctgtccaatgggcatctctttccagtgatggccgactaggccatcttttgatacatatgcagctagagtcaagagctccggggtactggttagttcataatgttgttccacctatagggttgaagttccctttagctccttgggtactttctctagctcctccattgggggcactgtgatccatccaatagttgactgcgagcatccacttctatgaactgctttcttaatcagccatgtctcaattcccctcctcccctgcatcctcgtgtgtgtgtgtgtgtgtgtgtgtgtgtgtgtgtgtgtgtgtgtgtgtggtcttaccatgtagatcatattagtctgaacttgtagcaatcctcctacctctttcaaaaagaaaagttttcttatttttaaactgggtatgagaagagcacttcttttacaagattgtagagagggctaatggagatgtctctactatctggaatattttctttccagattatctcagtcttcacatccaagacatagttcaaatggcaagaccccagaggcctgttccctccccagtttcccatgtcactttgtttgaagttctgcatagcatttgtcactatctgagtttatctttatttacttatttgcttactagctatgcgacctcaatttctctgagtccctttcttctcactaccatttatttggtgtccagaggcaggtctgcatgtagtttcactgcataataaatagttgttgacttattcacttcctcttgttgctgtaagcctttgagaaagctaatggacagccacactttgggctggtttctgatagtttatatgttgggggtgggtgggagggctgttatcaaagcactgtaagtttacgatccagttcagccttgggaacctagcatgggagcattggaacgtgacttgtgtgcttcccagaaccacggagacttgaagataactagcttatcctttctgtacataaaaaatggtacagctggacatcaaacaagggagacttagtgctaagctttgtggtggtaaacagaagacaagaagacgggaagtgtggatacagagcaagagatttcccttgggaaaggctttgtaaaggaacctgaaagggtgggaaaccatcccagagagaaaaacccaggcaccaatgctagcaaaccacttagactaatgcctgttccgtagataaaatgagatatatgtttatgaagcaaaaccatccaactgataatttattgccaatcagaattttattattgttttaaaagatacaaaaatagtaaaaaaaaaagttacaatcagctatatatgaattgaccctttccaaaattcccctaaaagagctatcatggcatctatttggctgacagtagaaaatgctatatattcatttttagaaacagaattttcagaagcccttacatctgggcactatatgggtttcctcagatcatctgagtgaacacactagtccccagaaacatttgcacagtcagatgactacacaagaaggacctccaaagactctgtcccatgatggagggtttacatgctcttttgattgtagacataaggtgggcagctgcagttgggttgttcgctaggctctggcaaggtgaacacgtggtaggaagtatcattcttcggagtcgcacccatgttgttgctaggtgctttcgcggagtagggcttagtgagccaaggggaccggcgaggggcagcacaggacacgggaatcacatatttcgttgatgagcccttggaagcatagtgaatctcagagctatagatgacgacatctggagagacagccttgatgcggatgccacattcggtaacgcggtagtgaaactggtagaaatgtgggtgaacatgattgggagggcaaccaaggcccaggtgcacctcgtaaaaatgaacatacacatcattattcagcaagaaggggtgaacggtgaccatgaaccaatctgtcgagcacagcacattcacttggttttgctccgagtagctgaagagcatgaaggcgactaagacagtgcctcccaggaacttgcgaaggttcattcttgcagcaggttaggtgaagactcacaggagacaagaaggcgtccaggaaggattctagaacacacaaaaacgtaagaggcaagttaccttaggtgttagctcagttatgagtttttaaaagaagtgcaattaggggattatgtttttgtttttgtttgtttgtttgtttgtttgttttttgagacatggtcttactctgtagccaaggctggcctgtaactcactatgttgtatattctggccttggactgtgacaatccttctacctctacctcagaagtgttgggatttcactgtaagccaccacaccaggctcagaatgctatttttgttatttgctcttggttttatttttctattttgtcttctctctctctctctctctctctctctctctctctctctccctccctccctccctccctctctccctccctccctccctccctccctccctccctccctcgctccctccctcctccctccctcttttcctccctttctgaaatttctctgattttatttctttctgaaattcctttgatttacaacatggcccaatgtatcagagaattttttggtcatcatgagttacaatgctactgataatagttccagatgaattaatttggtcatatttagctaagccattcagccaaatttcaatatgttgttgtcagggataaaatgtaatttctccttagggtttgtttttttttttttttttttttttttagaacttgttatatttgattgtacgaaggtgtttgctcagtttgttctacttcattgtggggaggtaagtgtacagaggacagagggcagaggacaagctttaggagtttctccttctaccacgtggattctaggacttgaactcaggtcgtcaggcttgccagcaagagcctttatccactgaaacatttcatcaggctttttcttaggttttaaaattcaatttgtttgctaagaaagtaggtcatattgaaggactcattgggataatatatgtgagaacattacaccattaaggcagattaggttactagtttaaactgtatttttctttgatttaatgtttaatacggaaactgtttcatttggattttttttttttttgctagccttacacaaaatgggataacaaccctgatcagtgcagagtctcattctccacatgagggaacaatatgtgttttataccaaaacagtatgagaaggccaacttaaagaagccatatgccaccattccaggcccatgttgctcagaggtagaacactaacctagaatatgggatggcatggatttcatccaaagcctgaccaaataaataaataaataaataaataaataaataaataaataaagtcccaactggccatgctagttatctttaatatgcaagctcctgcaatgaaattgaaattcacttctgcctcacatggaagtttctctcttctcagtactttttacattttaaatgtgtatcacatataaactacttaaaagaaggcctacattaaaaaggaagcattttgtttatgctttctttctgtgtagattgactaactagctcctacattctttgtctcgatactgttacacttgctaccttttgggttctttttgccttttgcctttcaaaagagtggtagagagagtggcagggagaaaagaataaaactaagaataagtgtctaaaacatggctgcagacgaaggcaacaaggggagaaaggagaataacatcacgagataataattcagctttcattttaaacatggaaaagcacatgaatcaaacggaaagtacctaaacattggaaggaaatacatgtacatagtgtagagattagcttttgttccctgctaagtattccccatatagatgatttcatcctttgaaaaatatttattgagtgcctactatattcatagcatcaggctaagatgctcccctaagacattactctttcccatttgtaaacaggcagccctttctctgcctttgctctggacagatatgcagagttttcaaagggaaaaaccgtgtggaggcccacaaggagtgagtgcactggcctggattggaatgctgggtttctggtgggtaccacttgcttgctggctcttgctatctttcttttcttctcaatgactgttcattctctctgtagtgttggggggggtgtgatataaaaagaagccaaaggagacttttctgtactctgtctttgttctgaattgttgctaatggggctgattttattttattttctcacaaaagcaacaatagaaatgcagcagcagcagcaacacacacacagagacagagagatagagacacacagagacacacatataaacagagagagacagagacagagaataacccccatcactgtcattttgtctgttactaaagaaaccattctgtgctaaagatgctttagactagctttctgtctctcatcccttcctccctccctccctccctccctccctccctccctccctccctccctccctccctccctcccttccttccttccttccttccttccttccttccttcctttctccattcctgtctccccttagttccctttcctttatttaacatgatctcactacttggggctatctgtcttgaacaaaatccttttcattaagtagttcctggaataggccgaggaaacaattctttcatcccatttttgttctcaatccccaaactgaggctccagtcgaaagctgttctggtccgggagttaatctgtccatttcctctccctttcccaagcatcctttgtgtaattccccctcctcttcccttttctcatgaataatccaaataaagttaccaaatgcctacattctccaagaaaaaagccaggcaatcacttcagactatcttcttgttccacacccacttttcaagttctattgctctttttcagtttgaaagaaagggtttgctgacaccactgtttcagcaatcacttagtacaaaacttcaaacttggacaatgcagaacccatttcctctagccagcaacagattgccatgtgacagaagcaataaatgaagatgcctatgcacatgacgacatacctctggactcagaaaaaaagaactttaatgaaagtcagtgcaaactatgctcaaggtcccatagctctgagggagaagggaaaggctagagattaggaggagagcagaatgtacttgataataggttttctaagtcagagcccagtacttcaaggctgtattttaggacatgcccccttttgctaaaaacacctcatcaaaaaatacagcagccatcctctcccagctgcctgccctttgcagggaccagggagaagggtgtgtttgtccacccacgatgtactcatttgggctggggaatggttataggtcgttcaccacacagtgtgaattcatcccatgagctggctttccttatacctatctaactgagatcatctggcagcataggatctagagaagggaccaagaagactggggttaccagggccgaaggcagctgaagggctaagaagggaagtggaagatgatgggaggtaccagactgaaggtatttcagctctagatggacctgtacacagcagcccaagagatgtgggattcgagcacaattccagctaaactctccggaaaccatcagtgctaatggggcagttggggacccaggaggattggaaatacaaagacaggagtgctcaccttgtgactactgttcaacttctggcaggtgggcttagaaaacaggttttagagtatgtattatgggagctggatttggccttgattgcaatttttccctgcagtgaactgagacttgttggtttaatgaaacagggctcaactatggaacataccgtcatgaactgagctatagagtggccaggcaaactcttctaacacctggatgcaaagtgtttgttttccgtgcagttccagagtacaaggaactttttgttttcttgaatgtggtttatgcatatacatttcccactagttccttcaacagaaattttcctttgcttcccttcctctaccaagactgcccctattcagaatagtcctttacattcaaaatgcatgaaatgagggttaggaagatggctcactgggtaaatcgcttgtgccgtaagcaggaggaccagatctccagaaggtaggtacaaagttgcttggctgcctgtaatcctagaggccaagaggcgggcggagccactgaatccatggaacagcctgaatagacagactagacaaaatggtaaccttcaggtgcggtgagaaactataatgtcgtgccaccatgccacgatctctacagggaatggctgaaaatgttacttgtaaagttaggtggggatgtagttaaagtggaaaataacaattggaataacaaaatagatacagttgtccttcactatgtagggctggttctcggagcttgggggaatacccaaatctgcagatgctcaactctcttatacaaaaagcatacaatccagccccatccgtcaggccactcatctctaacttagctctagattacttatataaacggtatggaaacagtcattaggttgtactgttcaggggataatagcaaagacagtgcatatatggtcagtacatagccaaaagttttcctcaaatattatcaatctgtgaatgcgtccatggaatgaaaagagtatattcatgtttttagaataatttatgggggataatatgatattatgatatagttgacacaagttatttactatctccatcagttctaaaacagtgaatcacaatccgggccatgacctttttgggggtggaaggaccctttcacaggggtcacatatctcatatcctacatatccgatatttacattatgattcataatggtagcaaaattacagctatgaggtagcaacagaaataatgttatggttggaggtcaccacaacatggactgcattaagcggtcacagcattaggaaggttgagaacccgtgttctgaaacttaaaaatagaacctggtgtaagtgtaaaaggtagcaaattggttaaaagaacagagtttcactgagaccagaagaacaagtttgtgtttgtgtgtgtgtttgtgttttattctatgtgtgcatgtggagcccagaggtagactttaggtgtattttatattgattaaaatatagggactttgaaatttcaggacgcttttcttttttatttctttagatagtggcctactatgtagggctggctggcttggaacttcctatgtaggccagattggcctcagactcaagagatgggtctgtctctgcttcccaagtgctgatattaaaggcttgagccaccatgtctggattacaaagctttctaaaagacacaaaaactcaagtgcaaatcagttttgtggcgttactgagcacagtgagaagcctaaaacacaaatctcccagaaagcaggtgggaattttgtccgcccatctcctctgatgtcactagagacatgtaggaattcttcgtggagaactgggaggggaattaagctaaacacttccacatctgtttttggaacagtttggagaaagagatcactccataaacccctggaagctgtctggttcgacagttaatttatttttaaaattcagtatactcgagacagcaaagtgatcatttgtatattgttttcccagactcttgttgtcaaaacaaagggaaacaaagaggaaaaggaaactccaaaagagcatgcaattagctcgggaaaatagaacgtcagagcttggatttgcaacaaagtttgctcattcttttgtatcttctttgaagaaaaaggagtcagagttgcaataaagggtcttctacagaacaaggagagagacacagacacagagacagagacagagacagagacagagacagagacagagagacacaaagagaaaagcacctgggtgctttgaacgcttgatcgttttttagcagatcaggcagtcgtaatctaactttaccctgtatactacctcaaggggagagagccttttaaggtcagggttctcttatagtccagttttaaagaattatttggctaattgttctcaaagagagcgaggcttgtgattattaatacaaggtcttacatgccgaaggtacactaaagtgagctagaaaatgaaataagtgcttttatggagcttgcactcccgctaaagaccctgggacaggttatgttttggagccccgagaaacacagtgctaaaataactgcacattattcaccgttttccgtggaagaattatgaactgctaatgcttaacaaagtccattttcttcatagagaaaaacacctcgacgggatcctttaaaaaggcgccgttcaaattaaactaaaaagcagccattaaatatatacacatatatagttttattctaaaaggaactgcagggaaaaaatggagccatagaaaagatgaaagaggaaaacactcctaactagccattgttaaatttttgttttatatacttctaatttggggtcagaaggtccatgtatacatatatgattcaaagtcatttctagaaaaaaaatgtcaaggctttctgaaagctgtttttaatttttgacgttgaatttgaaagcaatcaaagcattatttttgtttgggccatctggttttgttcttataatctgttaagctatcaagcatagtttaaatgtcatggttcatctgatacacaaataaaggttgtgaaataaataagagcctgggctccttgtaagagagagaacttttcgctgggctgggaatttagttactaaaaggtaagtagtccaatgtgaaatcaaaccacaataaggctacaaaacaatggggagccatgccttagctgaacacaaaattaaaaaaaaatacagaaagccatacacaaggggaaactggaagtctcaggtcctagaaacccctttcctcccatgtggagaagctgagttgttttaattttaaagtcgaacaaagggatagggatgtatttcataatttccataaaaatgtaaggaaaaatcccaaatgtatgcctctaattcagtttatgttttaatttaatcatttatttgagattaattccccctcccccctcccccagaaaacgacaccatttgccacaaagccccagagtcccttctcattttaaaaagacaaggtaggtttgtgtctgtgcaagactctcaactccacagcaggccagaccacatgtttaaccctttagtaggctctacaaggctactgaaaccaaataaaggccagttcacttgagatgatttcagaatcttagcctagggagggcagagagttggatcggatgctccacccagggccataccacctccttgatacaacttgtatcaataagcaagggctctagatagcttccaaaacccagctaggaacattcgctgttcccttttaaaactggaagctttgggcagagtctttaaagcagggtgcatgtatatagcctcttaagagtggcctatgtccaagtcaaaccatggttgattttataggctgtctggttgatttttaactgacctaactggcatgcatctttccgtaactcaaagctactatgtgtcttggctttacccagagtgtggccacgtggcacatgtgtatgtatcctggctggggccaattgccatcacttggctcctgacagggagagaagatttagaagaaaggttcttttgataggaatgctgtcagtcaactttagggagcctacaatttgggaggtgtgtgcacatattacagaaagtaaagaggctttggctgtggctgagacattgggagaaaagaaaaccatgcatgtatatgtgcatgtgggcacacgagcacacatatacagatatgagtacatccctcagatagaaagaaagcctcacatctctttcccatgtcattttgatccctactacttatttttatccttaattcttggcccataaacttttttttaaatttagaattttatcttatttgtatgagtgttttacctgcatgcatgtttgtgtatcatggatttgcctggtgcctgtagaggccagaagaggtgttggatcctgtggagctacagttacagatagtgtgagctgccatcagccaatgctggagccatcagcctagtccctggaaactctttaagaaacctaccacagtgtctgatatacaataagcaatcagcaaatagtttctgaatagacaaagacaaatacatggggctagggagttggttcagtaggtaaagggcttgctttgcaactgtgaggaccgaagtttgatccctgaacctatgtaaaaagccaggcaccatgatgtgtgctagttatcccagctctagagaggcgggggtgggggctgaggggtagggggtggagtagggcctgggacgaatacaggcaattccctccagcactggccagacagcttaaatgagtctatgagctccagcttcagtcacacactgtcttggaaaaaaatcagttggagaacagttaaggaagacacccagcattggcctcttgcctctacacttttacacgtgtgcacatacatgcacatatctgtatatgtatacatatacatgaacatgtatgcacacactgaaaacacacacacacacatacaaaagactatcagaaatcattacctgtccctatgcctccttgtctagaccctaaggatccgaatttaattaattcgctatccccttcaccacctttcccaatatttcacttcaaggcttgtaatagtgggagagcctttgtagtttgagatcatacttcttctgctcattggcttgcctgcttggcttgctgatgataaagactttatatcttcctagactgataattccattgtccattatcccaaatgcagacgacactccttgtacacctcttcccctctccccaattccctgtgatgaaccaacccctaaagaggacaaagtagaagtctttcttcctttagcttttatacaggggaaaaaacaaagaagttctcaagcccaagtcagactgtcttggttctcgagaggcagtataatgcgaaccagaagcttcaggtccgtccatggaagggtcctgctgtagtcagtgggattactcgggcacatgggtagggctctggagtcacttaaaacttttctaagctaaagaaggaaccacagccacaggctttcacactgttccttctgaaagcagatggacaagctcatgccagatccaagcatagagggcgagaccagacttctcccaaggtcctgggaaactggatgcaaagtgagctaagtctctgtggtcaatctcaggtttggtttgagtttcccttttctgagcagtgtcaaaagtgttcagagttaatcctatattatacataaggtatagtatttctatattataattatatatatacatatatataattataatcctatataatacataaaggatagtatttcactggcaaatatcactattcatcactgttctccatattttatgtagcaatgatttgaactcaggtgtgatactcctgatctagactctgatataacagggacttggttttgtaccttcttcctgaaatcactatttggttaaaacatatatacaggaaagcacatatgtatatacaataggttgaacctgtgttcattatttatgttatacaatatatacactaaaataaatatataatatatttaatacttttaatcccagcattttggaggaagagtcaggctggtctcttaactacataacaagtttaagggtagccagagctacagagtaaagcgttgtctcaataaaataacataaaataaaaaaaattaaaggatcctctgttgtattatcatatttgatatataatattattttatgaataacaaaaagggtaaattctctgctccttgataatcttttcctaaccaaaggcaaaaaaccccaaatgataatttatttggaattttttcaagggttaagtctttgcatccatatcactcatctacaaaacatatggtttcaattgcatccctccctagaagatatgtcaaaatcttaatgaagagtgtctcagaatgagaccttatttgaaagtagggtctctatagaggcaagaaagttaaaatgagatcattgtggtaggctctaatccaatgtgactgatgatatcttcttaaaaggagaaactttagcacagagacaggcatgggcagagaaaagataacacgaagacacacaaggagaagatggccacatcctggaatgctagagctgcaattcagggattgttgacaaataccagaactacatagctgagcccctcaccacctagggctctcagacatcctggccccactcacgccttgatcttgggcttctggcctccacaactgggagacaataaagttccatgcctcaagccatcttatttgtagtactaacaaaataatacctgtattttttttccagcggttgaacagacatacccctttcctgagaaaagagcctgcaactataaaggttgggttttataacttcctccaaccttaaattccattttgaatgagaaagctaatgagacaacaggaaatgaggccaaacagaaagagacctggcataagggctgctggtgctggtcttggatcctggcaggagagacaaaatgttgcttcaaaaataggtgggaaaggctggttaggagctgagggcctttggcttcctatgtaggcttccaagttaagaaagaatgacaacttattatgatggctggagaggcaattcatttcctctgtgtgaagttttaacttggaatgcactctcttccaccctgtgtgtgtgtgtgtgtgtgtgtgtgtgtgtgtgtgtgtttgcatatgcttgcgaaggccagtatcaggtgtcttcctcaatcacactccattttgtttatgaagcatctttctttgaacccggatcttactgattcagctagtctaggtagccagcttgctcttaagatcactgtttctgcctctggagtgctgggattataggtgggccaccatgcctgccccattctctatgcggatgctagggctcctaactctggtccttgtgcttgtgtatcaaggcttatatcatctactggtgtatctctccagctcttaagtcttccttttacttattatttggagatagaatcttgttaagccacctagaatgactaggaactcactctgtagtctaagttggctttgcctttgcgagtcttctgcctcagtctcctaagtggctgacattacagactagtaccaccacgtggggagaaatccaccgtttacttaagtttttactgagaagaagaagtcctacctatttttaacttgccaaacattttttccctgtcagtttggttggggccaccatgcctgggaggacagggatttgtgattgattgcttttctaaactgtgtggtcgttgagctccttctgctaaggtttgtcttgcaattttagttcttgctcctcttctctttggaactagagaccagtcaggcccttctgtagcaataggacaagtgttcaaagagaagtttctacttaactaagaatggagtaatgataatgacctttaaaaatacctttatgctcatttgcaaggctttaagcaattgcagaatctggagagtttacacaaaagcttgtttgatcatatatggatcacatatggcaataactctcaagaacaccacatttttgcttaatttggatatttttttatttgaatagaactctccctctgctaacacagcatactgtgtcttatccctcttaatgctcgcagctgtcttgtaaggtccccaaaggcaggaatcacatgctaatgccattgaaattggggcctagaaaggcagaaagctttggccaagatcatggttgtgaaaatgaatttgggccccagaccttcccacaagcctgttggtacccttctccggtcacagtgaatccacagtcacaggccattgtcatgagctaatcattgtgatgagaagagagttctgaagtagattaacctgtgaacgactgctctaagatacatggggaatctgccttagcatcttatggctgaattaggagaataaacaaaatcagcattcaaactgagcaaaacaagccacagagggcttctgggagcaacctcctgtaagggtggaaggctgagaggagctctgaggtggcattgagaggcattgagaggcaagtcaggctttcttgctagactgagctttggaaaaaaaaatctcaggcatattgttagggtttctgttgagatctctactataggctagccaggacagactcaggtgtgtataggctgaattttcctagaaagctgaacttccattcctcaaaaccaggcacttgagaaaggatgggatagtcactgaaactctccagcgagggcaggtgctcatcccggagagcatccacttccaaaaggaacaaatgatccccaattctgagaaggctgagtagttctttgtgaatcctctttcttcccaccaaatccagcacttcttcatgccaagtcatcagctcttaaacctaccccaccatgtgtgggttgggtttaaggagatggtgtgtgtgggggtgctgtttaatttccaatatggcttaccttccaccaggttacaacatctgctgtagtgcaagagctaaagggactttgcagtgaacaggctattctgaaacttcactattttgtcttgtacagagttagaggacctttccatgtgctgtatctataattccttatttagaaagttttcctttttttttctactaagggctgtaaaaaaggaagaaagaaagaaagaaagaaagaaagaaagaaaaactcagtctgacattatacaatcagagatactttcctgattttagaaacattccactgcagaaggaaggagacagacttactgaggcactgagcaagggctctccatgcacaatcttatacaccctccactgcagctctgtgtgataggtactatgtatggttgctactaggctcaccttagagaagacgctgagagctagatgggtaaggaaactcacttaagatataaagctagtaagtgcaaggacaagatgggaagaatatgccaaactcacaggaaagaggcctgccacagtggtgtgcacctttaatcccagtacttgagaggctgaggcaggcagatctcggtgttcaaggccagcctgatctacatagagttctaggccaaagttacatagagagaccagatctcaaaacagacagacatacaggagggaaagagagttatagcttatataactctccggtgttagggaagcgaagagctttttaagcaggggaagagaaaagcaaaggcaataaaggagaggcagacatgcaaagctacagtgtaggcaactctaggtcactttctattttatcattcctcatatttgagactttgagaaaaagaagccattcctattttaacagaacacatttgttccatggtctgcatgcatactttgaatataatggacccaggaacatgtgagatattcaggcattccaaactcatttgtctgtctgtctatctatctatctatctatctatctatctatctatctatctatctctattctgtgtgtctgtatgtgtgtacatgtgcatatgcatgtggaggctaaagatcaacattggttgtcttcttcaactgacaaccatcttaatttttgagatggggcctttcactgcacctgaacctcatcaatttggcaagacaggccatctagcaaactctagggatcttctgatctccattaccccagcactagaattctaggcactctacatagccagctttctacatggctcctggagatttgaattcaggttctcaggcttgtacaagaaagtctttactaactgagcagtctcctaagtggcccccattatattttggtaatacaaacccacttgacttgtatacaaagccatagatatgacaactccgaaactgcctgtccaactacttttcctgaagctaaaagggctatcacacatcctatgagccttatagttctcatggaagaagacaatatcatagtccctattacactggagacagggaccacgcctctttctgacttcatcatgtctttttataaagacttctggacttcacttaccaagcctaggtagctgtctcactgcagaacgagcctggataggagggaagggagcaagcagtagcatcagcagcctaatgtcagtcagtgggtgactcctcattagtgccacattctacatatccagagctaggctgctcttgtgctctaatatcactgcgattttcacatacattataatactgagaagggagagggagagggagagggagagggagagcaagagggagagcgagagcgagagcgagagcgagaacaagagaaaatattcatctactttcttccaggatgaagaaagctagctgcaaggttgggaaattcttcattcctgttcaaaatcactagcttgatgtgttgttggtggtggtgggggttgagctgattccctgcccccactaagagcatctcctggcttcacaggctctttatgaagaattgcatattgtttgagccatcaacttggctcatacgaaaagcagaacaactgtggcacccacctgttagaaatcaagactcgggtattaaaaccagaagcgctggcccattagaagagcctggctctgttgcatgggaggcaaacccctcgtaaagccagggattagtgtgtccatactggggcagtgactgaagcaggtgctcattttttcccctgacagcctagaagtagaagctgaaatagaataagttctcacagggcatgaccccagataggagatgtggaggtaactgacactccttggtttttgatacccctggaaaatggcacgacaatctcttggcacacaatggcagctgccctagctctttggtgacggctgttctacagaacgagggaggaaaatgtgaataaaaaatcgagggaattgtgtgacagaggaatcaagaacatgttgcaaagagccatctcattattatttatgaaatgaaatggatctccatggaggaattctcttttttgggctctctttgggggattttgttcatgggtgatgatagacctgtgggtattttattatttatttatttgttaaaaaaaaacaagttgtaagcacaatttgctattttaagtacaaggattggcagtatggcttcttgtgtgtgtgtgtgtgtgtgtgtttcagaatttgtgaacatacaagggtgacttttaacttagacctggcaatacccttgtttggattgccctatatatacgtgatcttgggaattccagatctagctgattagatttggaggatgagaaatgacattgataaggaggagacagtgaatgaagtcaccttgtgggacacacgtgactgcaatttaagactatctcaggcaggccttgaactttcggcaatccttctgactctgccccacaagtgctgtgattacaggccttcacacctagcttacttacttagtacagtttctaagatataaagtttcaaccagtgtttctgtaattaaatttattttttgttaagtataaaaaaacgtaactaactgcacatccaagcagaagtcacacatcaggaaatatactaagtagtttttgtttatgatctcatgtcactatccctaccactatcaattattattgtgctatgagaccccttagaacttgtggtttgtaggatgagatacatattattattttatataggaagatagtaatgcttggtaaataatacccaagactatacatctattaaagaatagtgtaggttccttccaggatcatcctgacacactgaagtcactcaggtacttatctatcttgcccatgcctggacattttcaacagctcaggctgtccagggatgtagctccatggtacagtgcttccctagcaggtgccctgggcctcaaggaaacaaagactaagctgggggtggggtgctgtgattacaggcaagagccttcacacctagcttcctgcaatctcagcatacagagaggctgaggcataaagatgaggagtttaaggctagcccaagataca

SEQ ID NO: 5 - protein, 102 aa, Artificial Sequence
  ctFGF23-His
MTRLTVLALLAGLLASSRASAEDDSERDPLNVLKPRARMTPAPASCSQELPSAEDNSPMASDPLGVVRGGRVNTHAGGTGPEGCRPFAKFIGSGHHHHHHGS

SEQ ID NO: 6 - DNA, 7862 bp, Artificial Sequence
  eGFP
gtaaccgtcgacattgattattgactagttattaatagtaatcaattacggggtcattagttcatagcccatatatggagttccgcgttacataacttacggtaaatggcccgcctggctgaccgcccaacgacccccgcccattgacgtcaataatgacgtatgttcccatagtaacgccaatagggactttccattgacgtcaatgggtggactatttacggtaaactgcccacttggcagtacatcaagtgtatcatatgccaagtacgccccctattgacgtcaatgacggtaaatggcccgcctggcattatgcccagtacatgaccttatgggactttcctacttggcagtacatctacgtattagtcatcgctattaccatgggtcgaggtgagccccacgttctgcttcactctccccatctcccccccctccccacccccaattttgtatttatttattttttaattattttgtgcagcgatgggggcggggggggggggggcgcgcgccaggcggggcggggcggggcgaggggcggggcggggcgaggcggagaggtgcggcggcagccaatcagagcggcgcgctccgaaagtttccttttatggcgaggcggcggcggcggcggccctataaaaagcgaagcgcgcggcgggcgggagtcgctgcgttgccttcgccccgtgccccgctccgcgccgcctcgcgccgcccgccccggctctgactgaccgcgttactcccacaggtgagcgggcgggacggcccttctcctccgggctgtaattagcgcttggtttaatgacggctcgtttcttttctgtggctgcgtgaaagccttaaagggctccgggagggccctttgtgcgggggggagcggctcggggggtgcgtgcgtgtgtgtgtgcgtggggagcgccgcgtgcggcccgcgctgcccggcggctgtgagcgctgcgggcgcggcgcggggctttgtgcgctccgcgtgtgcgcgaggggagcgcggccgggggcggtgccccgcggtgcgggggggctgcgaggggaacaaaggctgcgtgcggggtgtgtgcgtgggggggtgagcagggggtgtgggcgcggcggtcgggctgtaacccccccctgcacccccctccccgagttgctgagcacggcccggcttcgggtgcggggctccgtgcggggcgtggcgcggggctcgccgtgccgggcggggggtggcggcaggtgggggtgccgggcggggcggggccgcctcgggccggggagggctcgggggaggggcgcggcggccccggagcgccggcggctgtcgaggcgcggcgagccgcagccattgccttttatggtaatcgtgcgagagggcgcagggacttcctttgtcccaaatctggcggagccgaaatctgggaggcgccgccgcaccccctctagcgggcgcgggcgaagcggtgcggcgccggcaggaaggaaatgggcggggagggccttcgtgcgtcgccgcgccgccgtccccttctccatctccagcctcggggctgccgcagggggacggctgccttcgggggggacggggcagggcggggttcggcttctggcgtgtgaccggcggctctagagcctctgctaaccatgttcatgccttcttctttttcctacagctcctgggcaacgtgctggttgttgtgctgtctcatcattttggcaaagaattcggtaaccatttaaattggcgcgccgccaccatggtgagcaagggcgaggagctgttcaccggggtggtgcccatcctggtcgagctggacggcgacgtaaacggccacaagttcagcgtgtccggcgagggcgagggcgatgccacctacggcaagctgaccctgaagttcatctgcaccaccggcaagctgcccgtgccctggcccaccctcgtgaccaccctgacctacggcgtgcagtgcttcagccgctaccccgaccacatgaagcagcacgacttcttcaagtccgccatgcccgaaggctacgtccaggagcgcaccatcttcttcaaggacgacggcaactacaagacccgcgccgaggtgaagttcgagggcgacaccctggtgaaccgcatcgagctgaagggcatcgacttcaaggaggacggcaacatcctggggcacaagctggagtacaactacaacagccacaacgtctatatcatggccgacaagcagaagaacggcatcaaggtgaacttcaagatccgccacaacatcgaggacggcagcgtgcagctcgccgaccactaccagcagaacacccccatcggcgacggccccgtgctgctgcccgacaaccactacctgagcacccagtccgccctgagcaaagaccccaacgagaagcgcgatcacatggtcctgctggagttcgtgaccgccgccgggatcactctcggcatggacgagctgtacaagtaatgaggcgcgccgtttaaaccccgggcgactgtgccttctagttgccagccatctgttgtttgcccctcccccgtgccttccttgaccctggaaggtgccactcccactgtcctttcctaataaaatgaggaaattgcatcgcattgtctgagtaggtgtcattctattctggggggtggggtggggcaggacagcaagggggaggattgggaagacaatagcaggcatgctggggatgcggtgggctctatggcccgggcctgcagggaagttcctattctctagaaagtataggaacttctaccgggtaggggaggcgcttttcccaaggcagtctggagcatgcgctttagcagccccgctgggcacttggcgctacacaagtggcctctggcctcgcacacattccacatccaccggtaggcgccaaccggctccgttctttggtggccccttcgcgccaccttctactcctcccctagtcaggaagttcccccccgccccgcagctcgcgtcgtgcaggacgtgacaaatggaagtagcacgtctcactagtctcgtgcagatggacagcaccgctgagcaatggaagcgggtaggcctttggggcagcggccaatagcagctttgctccttcgctttctgggctcagaggctgggaaggggtgggtccgggggcgggctcaggggcgggctcaggggcggggcgggcgcccgaaggtcctccggaggcccggcattctgcacgcttcaaaagcgcacgtctgccgcgctgttctcctcttcctcatctccgggcctttcgacctgcagcccggtggacagcaagcgaaccggaattgccagctggggcgccctctggtaaggttgggaagccctgcaaagtaaactggatggctttcttgccgccaaggatctgatggcgcaggggatcaagatctgatcaagagacaggatgaggatcgtttcgcatgattgaacaagatggattgcacgcaggttctccggccgcttgggtggagaggctattcggctatgactgggcacaacagacaatcggctgctctgatgccgccgtgttccggctgtcagcgcaggggcgcccggttctttttgtcaagaccgacctgtccggtgccctgaatgaactgcaggacgaggcagcgcggctatcgtggctggccacgacgggcgttccttgcgcagctgtgctcgacgttgtcactgaagcgggaagggactggctgctattgggcgaagtgccggggcaggatctcctgtcatctcaccttgctcctgccgagaaagtatccatcatggctgatgcaatgcggcggctgcatacgcttgatccggctacctgcccattcgaccaccaagcgaaacatcgcatcgagcgagcacgtactcggatggaagccggtcttgtcgatcaggatgatctggacgaagagcatcaggggctcgcgccagccgaactgttcgccaggctcaaggcgcgcatgcccgacggcgaggatctcgtcgtgacccatggcgatgcctgcttgccgaatatcatggtggaaaatggccgcttttctggattcatcgactgtggccggctgggtgtggcggaccgctatcaggacatagcgttggctacccgtgatattgctgaagagcttggcggcgaatgggctgaccgcttcctcgtgctttacggtatcgccgctcccgattcgcagcgcatcgccttctatcgccttcttgacgagttcttctgagcgggactctggggttcgaaatgaccgaccaagcgacgcccaacctgccatcacgagatttcgattccaccgccgccttctatgaaaggttgggcttcggaatcgttttccgggacgccggctggatgatcctccagcgcggggatctcatgctggagttcttcgccgtttccctgccacagtctgagagctccctggcggaattcggtaccaataaaagagctttattttcatgatctgtgtgttggtttttgtgtgcggcgcgaagttcctattctctagaaagtataggaacttccctgcaggctcgaggtcttgtgacactcaagaagctaccagagagtgcctgggtatgaaccttgatggcaacaaagagcctgtgtcgctggtagaaagcggcgtcagaagtgagtcggagcatctccaagtcactattggagccactgtacccactggctttgaacaaacggctgcgggggaagtgagagagaaactgaagtcggcctgcagaatcagcttaattaaggtacccagcttttgttccctttagtgagggttaattgcgcgcttggcgtaatcatggtcatagctgtttcctgtgtgaaattgttatccgctcacaattccacacaacatacgagccggaagcataaagtgtaaagcctggggtgcctaatgagtgagctaactcacattaattgcgttgcgctcactgcccgctttccagtcgggaaacctgtcgtgccagctgcattaatgaatcggccaacgcgcggggagaggcggtttgcgtattgggcgctcttccgcttcctcgctcactgactcgctgcgctcggtcgttcggctgcggcgagcggtatcagctcactcaaaggcggtaatacggttatccacagaatcaggggataacgcaggaaagaacatgtgagcaaaaggccagcaaaaggccaggaaccgtaaaaaggccgcgttgctggcgtttttccataggctccgcccccctgacgagcatcacaaaaatcgacgctcaagtcagaggtggcgaaacccgacaggactataaagataccaggcgtttccccctggaagctccctcgtgcgctctcctgttccgaccctgccgcttaccggatacctgtccgcctttctcccttcgggaagcgtggcgctttctcatagctcacgctgtaggtatctcagttcggtgtaggtcgttcgctccaagctgggctgtgtgcacgaaccccccgttcagcccgaccgctgcgccttatccggtaactatcgtcttgagtccaacccggtaagacacgacttatcgccactggcagcagccactggtaacaggattagcagagcgaggtatgtaggcggtgctacagagttcttgaagtggtggcctaactacggctacactagaaggacagtatttggtatctgcgctctgctgaagccagttaccttcggaaaaagagttggtagctcttgatccggcaaacaaaccaccgctggtagcggtggtttttttgtttgcaagcagcagattacgcgcagaaaaaaaggatctcaagaagatcctttgatcttttctacggggtctgacgctcagtggaacgaaaactcacgttaagggattttggtcatgagattatcaaaaaggatcttcacctagatccttttaaattaaaaatgaagttttaaatcaatctaaagtatatatgagtaaacttggtctgacagttaccaatgcttaatcagtgaggcacctatctcagcgatctgtctatttcgttcatccatagttgcctgactccccgtcgtgtagataactacgatacgggagggcttaccatctggccccagtgctgcaatgataccgcgagacccacgctcaccggctccagatttatcagcaataaaccagccagccggaagggccgagcgcagaagtggtcctgcaactttatccgcctccatccagtctattaattgttgccgggaagctagagtaagtagttcgccagttaatagtttgcgcaacgttgttgccattgctacaggcatcgtggtgtcacgctcgtcgtttggtatggcttcattcagctccggttcccaacgatcaaggcgagttacatgatcccccatgttgtgcaaaaaagcggttagctccttcggtcctccgatcgttgtcagaagtaagttggccgcagtgttatcactcatggttatggcagcactgcataattctcttactgtcatgccatccgtaagatgcttttctgtgactggtgagtactcaaccaagtcattctgagaatagtgtatgcggcgaccgagttgctcttgcccggcgtcaatacgggataataccgcgccacatagcagaactttaaaagtgctcatcattggaaaacgttcttcggggcgaaaactctcaaggatcttaccgctgttgagatccagttcgatgtaacccactcgtgcacccaactgatcttcagcatcttttactttcaccagcgtttctgggtgagcaaaaacaggaaggcaaaatgccgcaaaaaagggaataagggcgacacggaaatgttgaatactcatactcttcctttttcaatattattgaagcatttatcagggttattgtctcatgagcggatacatatttgaatgtatttagaaaaataaacaaataggggttccgcgcacatttccccgaaaagtgccacctaaattgtaagcgttaatattttgttaaaattcgcgttaaatttttgttaaatcagctcattttttaaccaataggccgaaatcggcaaaatcccttataaatcaaaagaatagaccgagatagggttgagtgttgttccagtttggaacaagagtccactattaaagaacgtggactccaacgtcaaagggcgaaaaaccgtctatcagggcgatggcccactacgtgaaccatcaccctaatcaagttttttggggtcgaggtgccgtaaagcactaaatcggaaccctaaagggagcccccgatttagagcttgacggggaaagccggcgaacgtggcgagaaaggaagggaagaaagcgaaaggagcgggcgctagggcgctggcaagtgtagcggtcacgctgcgcgtaaccaccacacccgccgcgcttaatgcgccgctacagggcgcgtcccattcgccattcaggctgcgcaactgttgggaagggcgatcggtgcgggcctcttcgctattacgccagctggcgaaagggggatgtgctgcaaggcgattaagttgggtaacgccagggttttcccagtcacgacgttgtaaaacgacggccagtgagcgcgcgtaatacgactcactatagggcgaattggagctcgcgatcgcctgcatgcagtggaaacactcttgtcttttctcctgatgagcctgcatattgcttgtttagtcacgtttcactgcctgtaatccgtgcccttatttatactacagttttaactcgataggtacattgaaatacaaaaagagatggcattgtttccctttttcttccctgtattgcctctagagactgttggtccttttagaaacatctcccctaaggg

SEQ ID NO: 7 - DNA, 21 bp, Artificial Sequence
  Primer
cagggggacggctgccttcgg

SEQ ID NO: 8 - DNA, 23 bp, Artificial Sequence
  Primer
gcgaaggagcaaagctgctattg

SEQ ID NO: 9 - DNA, 21 bp, Artificial Sequence
  Primer
ggtggcatcgccctcgccctc

SEQ ID NO: 10 - DNA, 22 bp, Artificial Sequence
  Primer
ccaacacagatgagcctaagcc

SEQ ID NO: 11 - DNA, 25 bp, Artificial Sequence
  Primer
aactaatgaccccgtaattgattac

SEQ ID NO: 12 - DNA, 23 bp, Artificial Sequence
  Primer
catcgccttctatcgccttcttg

SEQ ID NO: 13 - DNA, 30 bp, Artificial Sequence
  Primer
aacctgagccagactttccactgcaatatc

SEQ ID NO: 14 - DNA, 18 bp, Artificial Sequence
  Primer
gtgcgtgttcactcgacc

SEQ ID NO: 15 - DNA, 7448 bp, Artificial Sequence
  plasmid-FGF23
gtaaccgtcgacattgattattgactagttattaatagtaatcaattacggggtcattagttcatagcccatatatggagttccgcgttacataacttacggtaaatggcccgcctggctgaccgcccaacgacccccgcccattgacgtcaataatgacgtatgttcccatagtaacgccaatagggactttccattgacgtcaatgggtggactatttacggtaaactgcccacttggcagtacatcaagtgtatcatatgccaagtacgccccctattgacgtcaatgacggtaaatggcccgcctggcattatgcccagtacatgaccttatgggactttcctacttggcagtacatctacgtattagtcatcgctattaccatgggtcgaggtgagccccacgttctgcttcactctccccatctcccccccctccccacccccaattttgtatttatttattttttaattattttgtgcagcgatgggggcggggggggggggggcgcgcgccaggcggggcggggcggggcgaggggcggggcggggcgaggcggagaggtgcggcggcagccaatcagagcggcgcgctccgaaagtttccttttatggcgaggcggcggcggcggcggccctataaaaagcgaagcgcgcggcgggcgggagtcgctgcgttgccttcgccccgtgccccgctccgcgccgcctcgcgccgcccgccccggctctgactgaccgcgttactcccacaggtgagcgggcgggacggcccttctcctccgggctgtaattagcgcttggtttaatgacggctcgtttcttttctgtggctgcgtgaaagccttaaagggctccgggagggccctttgtgcgggggggagcggctcggggggtgcgtgcgtgtgtgtgtgcgtggggagcgccgcgtgcggcccgcgctgcccggcggctgtgagcgctgcgggcgcggcgcggggctttgtgcgctccgcgtgtgcgcgaggggagcgcggccgggggcggtgccccgcggtgcgggggggctgcgaggggaacaaaggctgcgtgcggggtgtgtgcgtgggggggtgagcagggggtgtgggcgcggcggtcgggctgtaacccccccctgcacccccctccccgagttgctgagcacggcccggcttcgggtgcggggctccgtgcggggcgtggcgcggggctcgccgtgccgggcggggggtggcggcaggtgggggtgccgggcggggcggggccgcctcgggccggggagggctcgggggaggggcgcggcggccccggagcgccggcggctgtcgaggcgcggcgagccgcagccattgccttttatggtaatcgtgcgagagggcgcagggacttcctttgtcccaaatctggcggagccgaaatctgggaggcgccgccgcaccccctctagcgggcgcgggcgaagcggtgcggcgccggcaggaaggaaatgggcggggagggccttcgtgcgtcgccgcgccgccgtccccttctccatctccagcctcggggctgccgcagggggacggctgccttcgggggggacggggcagggcggggttcggcttctggcgtgtgaccggcggctctagagcctctgctaaccatgttcatgccttcttctttttcctacagctcctgggcaacgtgctggttgttgtgctgtctcatcattttggcaaagaattcggtaaccatttaaattggcgcgccgccaccatgaccagactgaccgtgctggctctgctggccggactgctggcctcttctagagctagcgccgaggacgactcggagcgggaccccctgaacgtgctgaagccccgggcccggatgaccccggccccggcctcctgttcacaggagctcccgagcgccgaggacaacagcccgatggccagtgacccattaggggtggtcaggggcggtcgagtgaacacgcacgctgggggaacgggcccggaaggctgccgccccttcgccaagttcatcggctccggccaccaccaccatcaccatggatcttaaggcgcgccgtttaaaccccgggcgactgtgccttctagttgccagccatctgttgtttgcccctcccccgtgccttccttgaccctggaaggtgccactcccactgtcctttcctaataaaatgaggaaattgcatcgcattgtctgagtaggtgtcattctattctggggggtggggtggggcaggacagcaagggggaggattgggaagacaatagcaggcatgctggggatgcggtgggctctatggcccgggcctgcagggaagttcctattctctagaaagtataggaacttctaccgggtaggggaggcgcttttcccaaggcagtctggagcatgcgctttagcagccccgctgggcacttggcgctacacaagtggcctctggcctcgcacacattccacatccaccggtaggcgccaaccggctccgttctttggtggccccttcgcgccaccttctactcctcccctagtcaggaagttcccccccgccccgcagctcgcgtcgtgcaggacgtgacaaatggaagtagcacgtctcactagtctcgtgcagatggacagcaccgctgagcaatggaagcgggtaggcctttggggcagcggccaatagcagctttgctccttcgctttctgggctcagaggctgggaaggggtgggtccgggggcgggctcaggggcgggctcaggggcggggcgggcgcccgaaggtcctccggaggcccggcattctgcacgcttcaaaagcgcacgtctgccgcgctgttctcctcttcctcatctccgggcctttcgacctgcagcccggtggacagcaagcgaaccggaattgccagctggggcgccctctggtaaggttgggaagccctgcaaagtaaactggatggctttcttgccgccaaggatctgatggcgcaggggatcaagatctgatcaagagacaggatgaggatcgtttcgcatgattgaacaagatggattgcacgcaggttctccggccgcttgggtggagaggctattcggctatgactgggcacaacagacaatcggctgctctgatgccgccgtgttccggctgtcagcgcaggggcgcccggttctttttgtcaagaccgacctgtccggtgccctgaatgaactgcaggacgaggcagcgcggctatcgtggctggccacgacgggcgttccttgcgcagctgtgctcgacgttgtcactgaagcgggaagggactggctgctattgggcgaagtgccggggcaggatctcctgtcatctcaccttgctcctgccgagaaagtatccatcatggctgatgcaatgcggcggctgcatacgcttgatccggctacctgcccattcgaccaccaagcgaaacatcgcatcgagcgagcacgtactcggatggaagccggtcttgtcgatcaggatgatctggacgaagagcatcaggggctcgcgccagccgaactgttcgccaggctcaaggcgcgcatgcccgacggcgaggatctcgtcgtgacccatggcgatgcctgcttgccgaatatcatggtggaaaatggccgcttttctggattcatcgactgtggccggctgggtgtggcggaccgctatcaggacatagcgttggctacccgtgatattgctgaagagcttggcggcgaatgggctgaccgcttcctcgtgctttacggtatcgccgctcccgattcgcagcgcatcgccttctatcgccttcttgacgagttcttctgagcgggactctggggttcgaaatgaccgaccaagcgacgcccaacctgccatcacgagatttcgattccaccgccgccttctatgaaaggttgggcttcggaatcgttttccgggacgccggctggatgatcctccagcgcggggatctcatgctggagttcttcgccgtttccctgccacagtctgagagctccctggcggaattcggtaccaataaaagagctttattttcatgatctgtgtgttggtttttgtgtgcggcgcgaagttcctattctctagaaagtataggaacttccctgcaggctcgaggtcttgtgacactcaagaagctaccagagagtgcctgggtatgaaccttgatggcaacaaagagcctgtgtcgctggtagaaagcggcgtcagaagtgagtcggagcatctccaagtcactattggagccactgtacccactggctttgaacaaacggctgcgggggaagtgagagagaaactgaagtcggcctgcagaatcagcttaattaaggtacccagcttttgttccctttagtgagggttaattgcgcgcttggcgtaatcatggtcatagctgtttcctgtgtgaaattgttatccgctcacaattccacacaacatacgagccggaagcataaagtgtaaagcctggggtgcctaatgagtgagctaactcacattaattgcgttgcgctcactgcccgctttccagtcgggaaacctgtcgtgccagctgcattaatgaatcggccaacgcgcggggagaggcggtttgcgtattgggcgctcttccgcttcctcgctcactgactcgctgcgctcggtcgttcggctgcggcgagcggtatcagctcactcaaaggcggtaatacggttatccacagaatcaggggataacgcaggaaagaacatgtgagcaaaaggccagcaaaaggccaggaaccgtaaaaaggccgcgttgctggcgtttttccataggctccgcccccctgacgagcatcacaaaaatcgacgctcaagtcagaggtggcgaaacccgacaggactataaagataccaggcgtttccccctggaagctccctcgtgcgctctcctgttccgaccctgccgcttaccggatacctgtccgcctttctcccttcgggaagcgtggcgctttctcatagctcacgctgtaggtatctcagttcggtgtaggtcgttcgctccaagctgggctgtgtgcacgaaccccccgttcagcccgaccgctgcgccttatccggtaactatcgtcttgagtccaacccggtaagacacgacttatcgccactggcagcagccactggtaacaggattagcagagcgaggtatgtaggcggtgctacagagttcttgaagtggtggcctaactacggctacactagaaggacagtatttggtatctgcgctctgctgaagccagttaccttcggaaaaagagttggtagctcttgatccggcaaacaaaccaccgctggtagcggtggtttttttgtttgcaagcagcagattacgcgcagaaaaaaaggatctcaagaagatcctttgatcttttctacggggtctgacgctcagtggaacgaaaactcacgttaagggattttggtcatgagattatcaaaaaggatcttcacctagatccttttaaattaaaaatgaagttttaaatcaatctaaagtatatatgagtaaacttggtctgacagttaccaatgcttaatcagtgaggcacctatctcagcgatctgtctatttcgttcatccatagttgcctgactccccgtcgtgtagataactacgatacgggagggcttaccatctggccccagtgctgcaatgataccgcgagacccacgctcaccggctccagatttatcagcaataaaccagccagccggaagggccgagcgcagaagtggtcctgcaactttatccgcctccatccagtctattaattgttgccgggaagctagagtaagtagttcgccagttaatagtttgcgcaacgttgttgccattgctacaggcatcgtggtgtcacgctcgtcgtttggtatggcttcattcagctccggttcccaacgatcaaggcgagttacatgatcccccatgttgtgcaaaaaagcggttagctccttcggtcctccgatcgttgtcagaagtaagttggccgcagtgttatcactcatggttatggcagcactgcataattctcttactgtcatgccatccgtaagatgcttttctgtgactggtgagtactcaaccaagtcattctgagaatagtgtatgcggcgaccgagttgctcttgcccggcgtcaatacgggataataccgcgccacatagcagaactttaaaagtgctcatcattggaaaacgttcttcggggcgaaaactctcaaggatcttaccgctgttgagatccagttcgatgtaacccactcgtgcacccaactgatcttcagcatcttttactttcaccagcgtttctgggtgagcaaaaacaggaaggcaaaatgccgcaaaaaagggaataagggcgacacggaaatgttgaatactcatactcttcctttttcaatattattgaagcatttatcagggttattgtctcatgagcggatacatatttgaatgtatttagaaaaataaacaaataggggttccgcgcacatttccccgaaaagtgccacctaaattgtaagcgttaatattttgttaaaattcgcgttaaatttttgttaaatcagctcattttttaaccaataggccgaaatcggcaaaatcccttataaatcaaaagaatagaccgagatagggttgagtgttgttccagtttggaacaagagtccactattaaagaacgtggactccaacgtcaaagggcgaaaaaccgtctatcagggcgatggcccactacgtgaaccatcaccctaatcaagttttttggggtcgaggtgccgtaaagcactaaatcggaaccctaaagggagcccccgatttagagcttgacggggaaagccggcgaacgtggcgagaaaggaagggaagaaagcgaaaggagcgggcgctagggcgctggcaagtgtagcggtcacgctgcgcgtaaccaccacacccgccgcgcttaatgcgccgctacagggcgcgtcccattcgccattcaggctgcgcaactgttgggaagggcgatcggtgcgggcctcttcgctattacgccagctggcgaaagggggatgtgctgcaaggcgattaagttgggtaacgccagggttttcccagtcacgacgttgtaaaacgacggccagtgagcgcgcgtaatacgactcactatagggcgaattggagctcgcgatcgcctgcatgcagtggaaacactcttgtcttttctcctgatgagcctgcatattgcttgtttagtcacgtttcactgcctgtaatccgtgcccttatttatactacagttttaactcgataggtacattgaaatacaaaaagagatggcattgtttccctttttcttccctgtattgcctctagagactgttggtccttttagaaacatctcccctaaggg

1. A method for producing a eukaryotic production cell line expressing a protein of interest (POI), comprising:
a) incorporating a gene of interest (GOI) encoding said POI into a chromosome of a eukaryotic host cell within an exogenous euchromatin protein expression locus by transfection, thereby obtaining a repertoire of recombinant host cells in a pool;
b) selecting a single cell from said pool within 12 days after transfection, wherein the selecting is at least according to the expression of said GOI or a marker indicating said expression; and
c) isolating and expanding the selected single cell, thereby obtaining the production cell line.

2. The method of claim 1, wherein said locus is integrated into the host cell via a vector comprising said locus.

3. The method of claim 2, wherein said vector is integrated randomly into the chromosome of the host cell or by site-specific integration.

4. The method of claim 1, wherein a selection marker gene is additionally incorporated into the host cell and the repertoire of recombinant host cells is maintained in said pool under corresponding selection pressure conditions, and wherein said selecting is at least according to any of the transfected marker gene, the marker, or the function of said marker.

5. The method of claim 4, wherein said selection marker gene is an antibiotic resistance marker gene or a metabolic function marker gene, and wherein said selection marker gene coexpresses a selection marker with the POI.

6. The method of claim 1, wherein method step a) comprises incorporating said GOI into said locus by site-specific integration.

7. The method of claim 1, wherein said host cell is a mammalian or avian host cell.

8. The method of claim 7, wherein the locus is a murine Rosa26 locus, or a mammalian homolog thereof.

9. The method of claim 8, wherein the host cell is a CHO cell.

10. The method of claim 1, wherein said repertoire of recombinant host cells covers host cells which differ in at least one of (i) copy number of said GOI; (ii) chromosomal locus or chromosomal loci where the GOI is incorporated; (iii) genetic stability; or (iv) epigenetic stability.

11. The method of claim 1, wherein said selecting is further according to any of cell size, cell cytoplasmic granularity, polarizability, refractive index, or cell membrane potential.

12. The method of claim 11, wherein said selecting is by a single cell sorting technique employing an optical flow cytometry method.

13. The method of claim 1, wherein said repertoire of recombinant host cells comprises at least 10,000 different clones which each differ in at least one genetic characteristic.

14. The method of claim 1, wherein the selected single cell is characterized by a GOI copy number of at least 5.

15. The method of claim 1, wherein said production cell line has a specific productivity producing the POI of at least 0.1 pcd, and wherein said production cell line is produced within less than 60 days.

16. The method of claim 1, wherein the POI is a recombinant or heterologous protein.

17. The method of claim 2, wherein the vector comprising said locus is selected from the group consisting of a bacterial artificial chromosome (BAC) vector, a P1-derived artificial chromosome (PAC), a yeast artificial chromosome (YAC), a human artificial chromosome (HAC), and a cosmid.

18. The method of claim 7, wherein said host cell is selected from the group consisting of HEK293, VERO, HeLa, Per.C6, HuNS1, U266, RPMI7932, CHO, BHK, V79, COS-7, MDCK, NIH3T3, NS0, SP2/0, or EB66 cell, and derivatives thereof.

19. The method of claim 12, wherein the single cell sorting technique is selected from the group consisting of forward light scatter (FSC), side light scatter (SSC), and selection using a microfluidic system.

20. The method of claim 16, wherein the POI is selected from the group consisting of a therapeutic protein, an immunogenic protein, a diagnostic protein, and a biocatalyst.
